United States Patent Application Publication US 2009/0089901 A1 - sequence listing, part 3

SEQ ID NO: 13251 - DNA, 394 bp, Zea mays
  unsure (1)..(394): unsure at all n locations; Clone ID: LIB3158-016-Q1-K1-E5
cggacgcgtgggcagcgcacgcaggacatggccggctccggcggcatggagcttccgccgctccgtgacctatcgcgacgggctgcctccttcctgcgcatggcgcggctggcgctcaccggcgccgccactccggcacaactgctcgccggagaggaggtcgtcgtcgacggcggcatcagctgcaacccatactacaagagcatcagcacggaggacgactggggatctgaactctggccggatcaggaggacgaatcggaactgctcgtggacggcgacgaggacgggtcaacgacgagaggtggtggtggtggtgcatctgagagtgtcactctggtcggagccggaagaggcggcgtcngtggcccgctggacagganacctcagttga

SEQ ID NO: 13252 - DNA, 392 bp, Zea mays
  unsure (1)..(392): unsure at all n locations; Clone ID: LIB3158-016-Q1-K1-E6
gtacctaggcatgtccccgtccaaaccgactcctccgcgcacgtatctgcgtgggttcacgacgtaccggcacgggcaccccttcggagaccgtttcctgcgcctgaggggcaggcgcttcttcgtcgggcgctcgcccatgaccgacacccgagtcagcttcttcgtggcctgccacgtcccttctgctgccaccagcagcagcagcagggtggtcgacgcgcgcgacacgaggcatgccgtgctgcagaagctgcgagaccagcggtgccccgccgaggtcgtcgagatggtgcgggacgccgaccccgactcgctgaatgtggtcaccagggtgtggtaccgcccgncgtggcaggtcgcgctcgccgccttccggaagggcgccgtga

SEQ ID NO: 13253 - DNA, 407 bp, Zea mays
  Clone ID: LIB3158-016-Q1-K1-E7
ctccatttcatttccgttccaggtctcctgtttccatcctcttccacggttccacttccacccccatctcctcgccctcggcaagcccagcaaccccaatccccaatcccgtccgcttctttccccgtccccgaccttgccgaggaacctcccgctcccaaatcctagcctctcctccctcgccgctcccctccccatggaggacgaggacgccggcctcggcgacgggggcgaggcctcccctccgcaccatgccgcggcgtcgggcgaccgggcgcgggacttggcggcgtccccgaccagctcgcgctccgtgacgcagacggtgaacgggtcccaccgcttcgtgatccagggctactcgctcgccaagggcatgggcgtggggaagcacatcgccagcgaca

SEQ ID NO: 13254 - DNA, 379 bp, Zea mays
  Clone ID: LIB3158-016-Q1-K1-E8
aaaaaggctaaagctttggcagagggactgaagaaaatcgagcagattacagtggactcagcttcggtcgagaccaatatgttcaagctctacaaggtgaggtctgttctgtttggccagaaaggcatcccatacctgaatacctacgatggccgcaccatgcgctaccccgacccttttaataagggcaacgacaccatcaagaacgatctggagaccaacaagaacattgacttcaataagttgtatttgccctttcatggacttcatccaggtatatacttaagtaggcttaatgttagcacaaacagttgatgagcaaagttaaatttagagtacacttatgtatgagttatttgacaatgcttatttatgagat

SEQ ID NO: 13255 - DNA, 344 bp, Zea mays
  Clone ID: LIB3158-016-Q1-K1-F1
tatctatcgagtggacgcgacgccaacagcgtcagcgcctcctcccgctctccggctcctgtcctgctcgcgctcgtcgcccccctgccgctcggctccccttggcccctccaatgccgccacccatggcactgctgccgctctcctccgcatccgcgtccgccgcgctgccgcccttccgctcctgcccgcccgctgcgatgctgcttcgcctcccctcccccgccccctcccatttcgcccgcccccgcgcggtctccaccgggtacgcggcgtccttctacggcggctcggcgatgtccgcggcaggcggcgcggacgaggaggaggaggtcggctacgag

SEQ ID NO: 13256 - DNA, 362 bp, Zea mays
  Clone ID: LIB3158-016-Q1-K1-F11
tacggttgcgatgacgactgacgggggcgttttttctggttgataccacgattgatgtgtgcgtgtatgagactaatccgtctgtggcgactgcggctccgtgtccgacggcgagtcagtggtaccagtggatggtagagtctcatgtgtttcatatttaccaactcttcgccaccattgcttgtaacgtgctataatgttatgttgtagcttcaacgcgataattacgtctactaagatctccgacatcttaattccgcattttccggttaggacgctaagcactagtgaattcatttcagctgatcttaaaaataaataactagcataccccaatgccgaaaggcttttttcttttcaaa

SEQ ID NO: 13257 - DNA, 240 bp, Zea mays
  Clone ID: LIB3158-016-Q1-K1-F12
tactgctgcgaggacaactgacgggggcgttttttctggttgatgccacgagtgaagagagctgtttatgagaccaatccgtcgccggcgactgaggcgccgtgttcgacggcgagtcagcgggaccagtggatggtacagacgcaggtgtttcagatttaccaactcttcgcctccattccgcgtaacgctcaaaagctgatgttggtgcttcttcgcgattatttcgtctacaaagat

SEQ ID NO: 13258 - DNA, 92 bp, Zea mays
  Clone ID: LIB3158-016-Q1-K1-F2
gttgcgaaggtagttctgtgcagatgaagccttggtgcggcttacctgatgttgagctcatgatgtgaaacaggaacgatacacttgtcttc

SEQ ID NO: 13259 - DNA, 413 bp, Zea mays
  Clone ID: LIB3158-016-Q1-K1-F3
taaaatttggtttctatatttttatactacaatttataataacgctccaactaagggcctatgtggttcttggtgttaaactttagcactacatttttaacacttagatttaaatatgagtgttaaaaggtgctacaagtgaagtgctaaattttagcatctaatagaactttagctccaaagtgtgctaacctttagtacttgttaaagtttagcatataacatccaagcatgtcttcagtatttcttctatattgccaacaatagtataaattattttctctatattgccaacaatagtacaatatgtatattctgaataaaactattgtcttgattgataagtgcttaaatttcgtttaactcacttgaaagccaaaaaaagagtatcccagttcgtaatttgtgctaga

SEQ ID NO: 13260 - DNA, 241 bp, Zea mays
  Clone ID: LIB3158-016-Q1-K1-F4
accgcgcgtgctgcaaggccggcatgcggccgagttcagaccggaacgttcgcgcgcagtgatcactacctggagagctttccaatctaacctgcctgtctgtataaaatggacagcaaagactctatacccatgctaactaccatatctctctacaagtcctcgcactatataacatgacggtcgacaaccgagcccgcggagtaccacggagagcgaccctttagccgaagaaaagccg

SEQ ID NO: 13261 - DNA, 149 bp, Zea mays
  Clone ID: LIB3158-016-Q1-K1-F5
ttatcgagctactgtctaatggtcatgtagattgatctaacgtcggatctgtatcatatacgtataggagtcgggaaagacaaagcgaatatatatgtgcacgtgatccgtgacagttatgatgagcgtattcatgtatcgcatgatgc

SEQ ID NO: 13262 - DNA, 295 bp, Zea mays
  Clone ID: LIB3158-016-Q1-K1-F6
gggcagccagcgctggtactgtccatcttgcctctgccgtgtctgcctgtgcgacacggacgatgaccagatcatcctgtgtgactgctgcgatcagggctatcatctctactgcctcagtcctccaagaagaaaggtgcccaaggggcattgggactgcgaaccctgcaaggagcggagggagaaggagaagaggatactgatgctccacaggaaggattacgatgaagacatcctgaagagtggcgagttccatggaccgaacttgctgcttaaggccgcgaaaaaggtgaag

SEQ ID NO: 13263 - DNA, 397 bp, Zea mays
  Clone ID: LIB3158-016-Q1-K1-F8
cggacgcgtgggttcagatcggctacgcctgagactgaatatggtaggatgaatattggcagccgtccatcaaagaggaagcctagtgggggaatagaatcactccgtgcaattccatggatctttgcttggacacaaacaaggttccatctgcctgtctggcttggatttggtgcagcgataaagcacatcatgcagaatgacatcaggaacatccatatactgagagaaatgtacaatgagtggccattcttcagggtcacccttgatttgcttgagatggtttacgcgaagggagacccgggaatcgcagctgtgtactacaaattgctagtggctgatgatttgcaatccttccgcgagcaactgagggagaagtatgaggagacaaaagagc

SEQ ID NO: 13264 - DNA, 103 bp, Zea mays
  unsure (1)..(103): unsure at all n locations; Clone ID: LIB3158-016-Q1-K1-G11
tacaatgtacgaaacgattcaagatgaatttgaaaggggttatagtgattcattgttgggtgttttaactcgatcttntttttatgatgtactgcaggagaga

SEQ ID NO: 13265 - DNA, 179 bp, Zea mays
  Clone ID: LIB3158-016-Q1-K1-G12
cccacgcgtacaaaacgatgggagaagacaactgaaaggggtgatagagattgatttttaggtgttctaactcgatcttgaccttaacatgtactgtgtgagagatcacactttgtctgacctgaaaacgctttgttatggtaaacactgcagctgcagaagcttgtacaaaatcgaca

SEQ ID NO: 13266 - DNA, 414 bp, Zea mays
  Clone ID: LIB3158-016-Q1-K1-G3
tttcttcagttcattgacgagaatctaacatttgtgtgtgctcatgttgaaggttaccgttttactccgaagcaaagctgatgttctttgtatacttgtggtaccctaagacaaagggaactacgtatgtttatggaactttctttaaaccatatatttctcagcatgagaatgaaatagaccggaatctccttgagctgagagctcgagccaccgacacggttgtcctttattttcagaaggctgcttcggcaggacaaagtactttctttgacgttttaaaatatgttgctgcccagtcaccttctcagaaatcaaggcaacgccttcatcaggaatcacagcagccgccacaacaacagcaaccacaagtgcaagtgcagcaggcgcaaccacaaaaacaagcagcacctg

SEQ ID NO: 13267 - DNA, 390 bp, Zea mays
  Clone ID: LIB3158-016-Q1-K1-G4
ccttctttcattcgccgccgccgcctgctctctgctgccgtcgccatggggagaaggcctgcgagatgctatcgccagatcaagaacaagccataccccaagtccaggtactgccgtggtgtccctgaccccaagatcaggatctacgatgttggcatgaagagaaagggtgttgatgagttcccctactgtgtgcaccttgtctcttgggagaaggagaatgtctccagtgaggctcttgaggctgaccgtattgcctgcaacaagtacatgaccaagtctgcaggaaaggatgccttccaccttcgggtccgggttcaccccttccatgtccatcgtatcaacaagatgctttcgtgtgctggggctgataggcatcagactggaatg

SEQ ID NO: 13268 - DNA, 404 bp, Zea mays
  Clone ID: LIB3158-016-Q1-K1-G5
gtactacttctgcaacggcgcgtccatgctgctggccgtcacggcggtggtgtacgtgcaggacaacgtgggctggggctggggcctcggcgtgccggccttctgcatgggcgtctccgtcgccgccttcgtggccgggtacccgatgtaccggaggctggagcccgcggggagcccgttcacgcggctcgcgcaggttgtcgtcgccgctgtcaagaagcggcggctgccggcggcggacgtcaaccccgcgttgctgtacgaggacgacgagctcgacgcgcccatctccatgtacggcaagcttgtgcacacggatcagctcagcttctttgaccgcgcggcgatcgtcaccgacggcgacctggtcacgctgacggacgcggactccggcaagccgtcga

SEQ ID NO: 13269 - DNA, 410 bp, Zea mays
  Clone ID: LIB3158-016-Q1-K1-G7
gcgaaggctcctgacggcaacggtggagtttatgctgcgctgaagtccaagaagctgatggaagacatggctgcgcggggagtgaaatacgtagactgctacggagtcgacaacgcgctggttcgagttgcggatcctacgttcttagggtacttcatcgacaagggtgtgtcttctgccgccaaggtggtgaggaaggcttacccgcaagagaatgtcggggtgtttgttcaacgaggccgcggtggacctctctccgtggttgagtacagcgaaatggacgcagctatgactactgagatcaatcagtcgacagggcgactccgttactgctggagcaacatctgcctgcacatgttcactctggacttcttgaaccaagtggcgaacagcctcgagaaggacagtgt

SEQ ID NO: 13270 - DNA, 352 bp, Zea mays
  Clone ID: LIB3158-016-Q1-K1-G8
ctaccccacacagaagcggcggcggcggagcaaacgcaggcgaaggcgagggtgtgagggaaggagcaccagccatggtgcacgtcaacttctaccgcaactatggtaagacgttcaagaaaccaaggcgtccttatgagaaggagcgtcttgatgctgaactgaagctggttggtgagtatgggctgaggtgcaagcgtgagctttggagggtacagtatgcactgagcaggatccgtaatgctgcaaggcacttgctcacccttgacgagaagaacccccgtcgtatctttgagggtgaggcacttctttcccgcatgaaccgctatgggctgcttgctgagggtcagaa

SEQ ID NO: 13271 - DNA, 242 bp, Zea mays
  Clone ID: LIB3158-016-Q1-K1-H11
tacaggcgtgagcacagttgggagttttccttaaaaggcggttcgtttttctctgtattcttctttctttcaaggcatcgctacatagatacagcaaaaacattccaagctacctcaaaaacagctaccgacgtacaccctttcgacatctaagaccaaaatcatatatgcttactactagctattcctgtacttgattctgtctataatgatacctgataaacatgcaccaaaaccaacta

SEQ ID NO: 13272 - DNA, 411 bp, Zea mays
  Clone ID: LIB3158-016-Q1-K1-H2
ggcttcatcggctcgcacctcgtggacaggctcatggagaacgagaagcacgaggtcattgttgctgataactttttcaccggttcaaaagataacctgaagaagtggatcggacacccaagatttgagctcatccgccatgatgtcactgagccacttcttgtggaggttgaccagatctatcaccttgcttgccctgcttcaccaatcttctacaagcacaatcctgttaagaccatcaagacaaatgttattggtaccctgaacatgctgggacttgcaaagagagttggagctaggattttgttgacatcaacatctgaagtttatggtgatccacttgagcattctcaaaccgaggcctactggggcaatggttacccaattggagtcaagaagttgttatgatga

SEQ ID NO: 13273 - DNA, 406 bp, Zea mays
  unsure (1)..(406): unsure at all n locations; Clone ID: LIB3158-016-Q1-K1-H3
cccacgcgtccgacttgttcgaggggatccagtccatgacctactgctgcggtaacttcggtgatgacaagggtgccagggccattgtcaaagccttcccacacataaaatgcactgtgctggcccctcccaagatcattgccaccaaaccggccgatggagcgatgataaactatgtcgaaggtgacatgttcagtttcattccacctgctcaaactgtcgtgctaaagcttgtgctgcaccacctgaccgatgaggagtgcgtcaagctcctggctcaatgccggaaggcgattccttcacggaaggatggcgggaaagttataatcggtgatattatgattgaccactctgggcctatgctggaaactcacctnctgatggacatcggcatgatgaccatgac

SEQ ID NO: 13274 - DNA, 420 bp, Zea mays
  Clone ID: LIB3158-016-Q1-K1-H4
ggaaaagaagagcaagttgagctggaggtgttcaacttcactggtgcaggaggagttgccttatcaatgtacaacactgacgagtccatccatgcctttgctgacgcttctatggccactgcttatgaaaagaaatggccattgtatcttagcaccaaaaacactattttgaagaaatatgatggcaggttcaaggacattttccaggaggtgtatgaagctggttggaaaaccaaatttgaagctgccggcatatggtatgagcaccgccttatcgatgacatggtagcatacgcacttaagagtgaaggagggtatgtctgggcttgcaagaattatgatggagatgtgcagagcgatttcttagctcagggttttggctcattgggtttgatgacttcggtactggtgtgccctgat

SEQ ID NO: 13275 - DNA, 403 bp, Zea mays
  Clone ID: LIB3158-016-Q1-K1-H5
gctcgggcccggccggttctacggcagcggcctgccgaggccgcgcttcttcccgggcgaccgcgtggacccgccggcgtccgtcaccgacccgctgctcgagtgggcgcgcgaagcgcactggtccatgggcggcatcagcgtgaagcgcctccgcctgcagggccgcatcgagggctccgtcgacaagctccgccgccgcgcgcaccgcgatgccagggtcaaggccaaggccaaggcccgcgccgctggccacatgccggcttcgctcgccgcgcttgggtccgacgacgacgcctccagcggcgactccgaggacgagcaggaggtggcggcgcgggagcgggccctgaagcgtgagcttgtcgacgacgacgaggactccgacgggtccggcgagtcg

SEQ ID NO: 13276 - DNA, 367 bp, Zea mays
  Clone ID: LIB3158-016-Q1-K1-H6
gtttatcaatgggtacaagaacgtgcttgctgttgctgtggagacggactactcgtacccacacgccgacaagatcaaggagtacctcaaggacccgagcaagtttgctgttgctgctcctgtagctgctgcggactctagtgctgctgctgcccccaaggaggaagagaaggctccagagcctgccgaggagtcggacgaggaaatgggcttcagcctgttcgacgactaagccgctcttatcgtccatccgccgcaagttttgcttctgcttattattttagtgcattatgttttagtagacaaaccatgttggtgtaattgacaatgttatctccttaaatgttgaaagtgcccgtgttgtgtc

SEQ ID NO: 13277 - DNA, 409 bp, Zea mays
  Clone ID: LIB3158-016-Q1-K1-H8
gtcggcgctccacgcggccgtcaacttcgggcagtacccgtacgccgggtacctcccgaaccgcccgtccgtcagccggaagccgatgccgacgccgggcagcgacgagtacgcggagctggagcgcaagccggagaaggtgttcgtgcgcaccatcaccagccagttccaggccctcgtcggcatctcgctgctggagatcctgtccagccactcctccgacgaggtgtacctcggccagcgcgacaccaaggagtggacgtcggacgccaaggcgcaggaggcgttcaagcggttcggcgcgcggctgaccgagatcgagaaacgcgtcgtcaccatgaacgcggaccctcgcctcaagaaccgcaacggcccggccgagttcccctacacgctgctctaccccaac

SEQ ID NO: 13278 - DNA, 388 bp, Zea mays
  Clone ID: LIB3158-017-Q1-K1-A1
ccgcaatggcgagcagcaccatggccctctcctccacggccttcgccggcaaggccgtgaacgtgccgtcgtcgtccgccttcggcgaggcccgcgtgacgatgcgcaagacggcggcgaaggccaagcctgcggcggcgtccgggagcccgtggtacggccccgaccgcgtgctgtacctgggcccactgtccggcgagccaccgagctacctgacgggcgagttcccgggcgactacggctgggacaccgcggggctgtcggcggacccggagacgttcgccaagaaccgggagctggaggtgatccactcccgctgggccatgctgggcgcgctcggctgcgtcttccccgagctgctcgcccgcaacggcgtcaagttcggcga

SEQ ID NO: 13279 - DNA, 305 bp, Zea mays
  Clone ID: LIB3158-017-Q1-K1-A10
tgtaaattaaggttcaagaagcaacaagtaatcactcataatacatatatataatggcggattggggtccagtggtgatagcagtggtgctgtttgtgttgcttagccctggtcttctgtttcaattgcctgggaggagcagagtggtagagtttgggaacatgcaaaccagtgcaatttctatcttggtccacacaatcatcttcttggtctcattaccatctttcttattgctattggtgtgcatatctacacttggctaggcttattctattctttttttggaaaggtttagaaaattttat

SEQ ID NO: 13280 - DNA, 112 bp, Zea mays
  unsure (1)..(112): unsure at all n locations; Clone ID: LIB3158-017-Q1-K1-A12
ttcggtggtgaggtatgttacnaaggttggggtttttccaagaaaccctccggttctcgatgtcggaagcgattcatggggcttttgcgtcgcaagggatgcaatttgtaaa

SEQ ID NO: 13281 - DNA, 385 bp, Zea mays
  Clone ID: LIB3158-017-Q1-K1-A2
cgaagcgcgagagcaatggcgtcgctgtcgtgcgcctccacgctgccctggaccgccgcctcctacccgcggccctcggcggggcgctgcctcacggcttctcgccgggctccgtcgctggtcatcgtcgcccaggggaaggtcaagaagtaccgccaggtcatattgacagacgacatagaagaggtgggggagaaaggggatacactgaaggtgcgagctggattctaccgcaacttcctccttcccaagggcaaggctacacttctgaccccagaagtcctcaaggaaatgcagctggagcaggagagaatagaagctgagaaaaagcgggtaaaagaagacgcccaacaacttgctcgagtttttgaaaccattggcgctt

SEQ ID NO: 13282 - DNA, 387 bp, Zea mays
  Clone ID: LIB3158-017-Q1-K1-A4
tggacaccaaagaattcgacatgcatgtgatcatcgagaccaaccgcacaacggggaggatcttccctgctgtcctagacgtcgagaaccccgagttcaagaggaagcttgacaggatggttgagatcaaccagaagatcattgccgtcggagagtccgacgaaatccccctagtgaagaacctgaagaggattcctcttgtcgcctctctggtgtccgagatcatcgccgcatacctcatgccccccattgagtctggctcggttgatttcgccgaatttgaaccccggctcgtttactgattctgtacaaagatttatccttgagttattcaccctgaaagacaagctggtggtgctttctgcctaaggggccttgaatgaatgg

SEQ ID NO: 13283 - DNA, 386 bp, Zea mays
  Clone ID: LIB3158-017-Q1-K1-A5
tgagttttggatcaacaggaaacagaatgatggaaggaggatctggtcacgtgttgtgcggtttcgggtggccttctgagcaaggtaaataaacggtcctgtccgaggcgcttcaagcctagctctcgtaatgttatcgtcatgtatgtaaatgtgtcttatagtgagcctattttgttgttccaatccttacggtgttccattctgaggtgctgaacctcggggcaacaagaccgaagctggtagggacttcaattggagaactggggttcaagcatgtagaattttaaaatcggttcatttgtctggacaatgttcctgactagtaatgtgatcgcaagacaaacgatgttatttccctctctggttatcaatatgtccatctc

SEQ ID NO: 13284 - DNA, 389 bp, Zea mays
  Clone ID: LIB3158-017-Q1-K1-A7
ctggaacgggcccatgggcgttttctaatttgacaagttcgccgtaggaaccgaggctgtggcaaagaagctggcagaactcagcggcaagggcgtcacaactatcatcggaggcggagactccgtcgccgccgtcgagaaggtgggagttgctgacgttatgagccacatttccacgggaggtggcgctagcctggaattgttggaaggaaaggagcttccgggagttgttgcgttgaatgaagccgccactgtgactgtatgaagcatgctttcattttgtttcgtcttcgtcttcacgtgccgttgtatacttgctacattctcgcttgcacctcctcagccgctcgctcgaaatgtaagagaccattgttttatagagctaatgg

SEQ ID NO: 13285 - DNA, 362 bp, Zea mays
  unsure (1)..(362): unsure at all n locations; Clone ID: LIB3158-017-Q1-K1-A8
cgagagctttacatccatcgcattggtcgctctggtcgttttggacgcaagggtgtggcgatcaatttcgtgcgcaaggatgacatccgtatcctgagagatatagagcagtactacagcacgcaaattgatgagatgccaatgaatggtggctgatcttatttgagcaaccgctcctcgcaaggtttggcttggtgtggcggtgagaagtggacgagaggggctttgtaatctgagtggagcagagatttgtttgtttacttttttggtgacggcttgaactgtatgtatatatattttagcatgctccagctcatgtaacactttttgggagacctatgttggtggcttannnaananaa

SEQ ID NO: 13286 - DNA, 333 bp, Zea mays
  Clone ID: LIB3158-017-Q1-K1-A9
gagtgaggccgtgcgcacgcagcggcggcggccagggcccaggggatcggcgtgcgcgcgtggcggggtagtcgctcgcgcgcgtacatggcagtatgacacgggattttgctgttcagtacgctacggttattactggcgtctctctctgtgtgtgtgtgtgtctcgtacgtagcccggtacgtagctagcagtgactgtcgcgtggacgtgtccggtgcgggctgcgagtgacgtgggctaaataaagtgtgcgtccggtggtaatggtggtggggcccggtgtcagtggcgcggtgccccatgcctgccgctgctgcagcttgttgtgtc

SEQ ID NO: 13287 - DNA, 302 bp, Zea mays
  Clone ID: LIB3158-017-Q1-K1-B1
ctgaacgccagctgcgatgcccccttcagggcccgcctctcggcgctgttggccgccgaggggagggacagcgtccggtgcgttttcaccgacgtcagctggaacgccgtgctgacgggttcaacgaacttggcgtgcccgcgcttggcatgatgacagccagcgccgcctcgttacgcgactacatggcgtaccgcaccttgatcgacaagggctacctgccggtgaaagaggagcgcaaggaggatcccgtacccgagctacccccgtaccgcgtcaaagacctgctccgggtcgacacg

SEQ ID NO: 13288 - DNA, 139 bp, Zea mays
  Clone ID: LIB3158-017-Q1-K1-B10
gggagagagcattgtttgagagggtgagaaagaatagcacagtggaagaggaagtggaaaatgaagtagaggaggaggatgaaagtggcgttagtattacttgagaagagaagaagaaaggggttggtagtaatggtgg

SEQ ID NO: 13289 - DNA, 220 bp, Zea mays
  Clone ID: LIB3158-017-Q1-K1-B11
ttctgacacctgtcgtccagaccctaggagttcctaacgcataggcgttgttcatttggctctgcggcccaatctctgggctgcttgagcagcccattgtatggtacagcatcgaccgatgccgattccgctttggtcggcgacgtgccttgatctttgtttgaaccatactcgtaacaactgttgcgttcctgaacggctatgcagcctatttaggaca

SEQ ID NO: 13290 - DNA, 229 bp, Zea mays
  Clone ID: LIB3158-017-Q1-K1-B12
ggcgcgtactccatcgaggccacgtgtcacgcgccgaagctggaggaagtgtacgccgaaatcttccgtgttctgaaaccgggggcgctctatgtttcctacgagtgggtgacgacggataagtaccgaggcgatgaccctgaacacgtggaggtcattcaggggattgagaggggggacgcgttgcctggccttagaaactacaccgacatagccgagacggcgcgta

SEQ ID NO: 13291 - DNA, 367 bp, Zea mays
  Clone ID: LIB3158-017-Q1-K1-B2
tgattattgcttttaatgcatatgacgagggaaagaaaagtgatcaagtctttgttccagtaattcatttggctgctgctgcgatgacacttgttaacctcgccccaggaggctgtctcattggtaccccgctgttggtggtcatggctgcgctgaccttgcagcactgctggcgagtggcatgccggagattaactgagcaccggcatcaacagcataacagcagctagttgtaggcttgccatcatgtaattttcccatgtatggttgactgaatcttctgatgtactatgacagtaaaaatcaaggtctgagtcgtgtcgtgtagttagacaaggggttattataggttgactcgatgttttgc

SEQ ID NO: 13292 - DNA, 353 bp, Zea mays
  Clone ID: LIB3158-017-Q1-K1-B4
ggactgagcaccgtccacgaatattgttgtgcccgtcatgtaccgggactcgtcgccgacaaggtacagcaccgtcgacgccaggtccttctccggatccagccatctccgcaggggcatcacctccgccgttgccttctccgccttctccttgcccacggacacggggaacttgtcttgcagatgcaggccgcggcaggcggcgttaacccttatcttgtgtttcccaagctccatcgcacacagctgaaacacaagaagaacttattagcaatcaaaagacgaaacgccaatgaacgatacagagatagttaaccctgggaaagacagtctaatgtctgggaaagcttttc

SEQ ID NO: 13293 - DNA, 385 bp, Zea mays
  Clone ID: LIB3158-017-Q1-K1-B5
agaaagagtacagctacaacaagatcctcaaggatctcaaaaaagagttctgctgcaatggtactgtagtccaggatccagagctaggccaggtcattcaactgcaaggtgatcagcgtaaaaatgtcgctacttttctagtccaggccggaatcgtgaaaaaagatagcatcaagattcacggattttagactgcaaatttgaagtgcttgtgtgtgcctatcatatgataccatatgataccaggtattgaagcttcggaagcttgttggccttcgtaacatcagtagtcgttattcatctgaatatgtgtcattatttgatttgataagactggtattgatgcaagttgtccttgcagtatgttttgtaagtgttacctgca

SEQ ID NO: 13294 - DNA, 387 bp, Zea mays
  Clone ID: LIB3158-017-Q1-K1-B7
ggaagaggctgtactcgctggacgcgggctccatcatccactccctctgcttctcacccaaccgctactggctctgcgctgcgacgcaggactctgtcaagatctgggacctcgagtcgaagcacgttgtgcaggacctcaagcccgacatccaggtctccaagaaccagatcctgtactgtacaagcttgagctggagtgcggacggaagcaccctctacactggctacaccgatgggtctatcagggtttggaagatctccgggtacggctacgcaggctagatgttgaaatccgcttggaggtctaggcagtctttcggaaaaaacattgtaatgttcgtcaagtttttgatgtcgtgagctatattgtctcttcgctactttc

SEQ ID NO: 13295 - DNA, 94 bp, Zea mays
  Clone ID: LIB3158-017-Q1-K1-B8
gcgccaactaaagaagaagtcagattatgtggctagcaagttccagacccagtgagagaaacacagtgataattcaattcaaaactcggcacag

SEQ ID NO: 13296 - DNA, 335 bp, Zea mays
  Clone ID: LIB3158-017-Q1-K1-B9
ggcggacccggcgccacagaacgggcgcatcgtggcccggttcgggttcgggttgggcggcaaggcgaagcctgctccgaagaaggtggcgaagacatcgacctcctctgaccggccgctgtggttccccggcgccgtggcgcccgactacctggacggctcgctggtcggcgactacgggttcgacccgttcggtctcgggaagcccgtggagtacctgcagttcgagttggactcgctggaccagaacctggccaagaatgaggccggcggcatcatcggcacccggttcgagtcctccgaagtcaagtccaccccgttgcagccctacagcg

SEQ ID NO: 13297 - DNA, 358 bp, Zea mays
  Clone ID: LIB3158-017-Q1-K1-C1
tttaactactcgaattgtagcccggcggagctgtggtcggctagctgttggactccacttggctggtgcattaagctccttgtttgctgttgttgtgacaagtgtaaattaatgtcagaaaaccattcggaaaaaaaaaaaaaaaaaaaaaaaaaaaaaaaaaaaaaaaaaaaaaaaaaaaaaaaaaaaaaaaaaaaaaaaaaaaaaaaaaaaaaaaaaaaaaaaagggggggcccccttttttttttttttttttatggaagaaaacttttaaattcttggggtaccttcccaaaaaaggtaatttttttgccaaatttttggctttcgaccaaatttttaataacctttttttagg

SEQ ID NO: 13298 - DNA, 300 bp, Zea mays
  Clone ID: LIB3158-017-Q1-K1-C10
gtgcctccgacgatgacgtggcgctgcacgcgaagaagctcatcagagacctcaacttgttccccgacgctgacgtcaacatcgttcccgttgctaattgcaccctccaaccccgcaggatcgtcgagaagcgcctgaggttcccgaagctgctagcttcggattccgagccttcggttgaggatttgggtcaccacgctggctattaccccattcagcattcacatggccgcaggatgttctactttttcttcgaatcacgcaataggaaggaggatcctgtcgtatttggttgactgg

SEQ ID NO: 13299 - DNA, 383 bp, Zea mays
  Clone ID: LIB3158-017-Q1-K1-C2
gcgccaactaaagaagaagtcagataatatggatagcaagttccagacccagtgagagaaacacagtgataattcaattcaaaactcggcacagcctccaaataagaatcactattcagtatcaaagaatgaaacgaaactggatgcatttagaaagaaggtcgaggaggagaaggccagatacctaacctctgttagggaaagccgagccatgacactgaacaatctgcagacagcccttccaaatgtgttccatgctctggagggattctcaggagtgtgcgtgcaggcatttgaaggtatcagctgatgcagtgaagttgctgttattcactcgggagcggcttcatctgctatttgctcgtgacattgctacgatggct

SEQ ID NO: 13300 - DNA, 391 bp, Zea mays
  Clone ID: LIB3158-017-Q1-K1-C3
cggacgcgtggggctgaattcaattctaatccacccattcccaggatcaaggtgtatctgtacatgatcttattgttcactgccagccgcagccttaaatatcatctttctggaaacaaaactccctgccccattcctcacatcggaacgatatatatagaaggggagcggggggaaaagaactccaacaaaactaaggagataaaaaaaaggactgctgctacaatggacccggaagaaccagtctctcacccgccgaatcacatcattttacagacaaaatcctccgatcccatggctgcgcttcaaaatccagccactcgaatgatttccggagaattcgcggcaaatttgcttcgaactcagatctccttcactgctgacctgatgc

SEQ ID NO: 13301 - DNA, 377 bp, Zea mays
  Clone ID: LIB3158-017-Q1-K1-C4
aggacacagatgatagttctgctactcaaacaatatgttcttcaaaagatgtcgtttctattgaagtacctatttcttctgcctgtccaagtgaacatcttgatggatcgagatcaggtggtctgaattgtagctgtgataagcctagccctacttcaattcttgatgtatcatttgaagatagcaacattaatggatctgaatcgtcaagaagcattccttgtagcaacgagagaattgccttacgatccgatgcaattgaatctgtcacgcgctcattatcatgggaggaggatatgagctcaccttcgcctttacttgattcgacaaacttaacccccatctcaagcgtggacgacgatgaacttgaatgtgtt

SEQ ID NO: 13302 - DNA, 361 bp, Zea mays
  Clone ID: LIB3158-017-Q1-K1-C5
agtcagacgaaaaaaaaaaaaaaaaaaaaaaaaaaaaaaaaaaaaaaaaaaaaaggaaaaaaaaaaaaaaaaaaaaaaaaaaaaaaaaaaaaaaaaaaaaaaaaaaaaaaaaaaaaaaaaaaaaaaaaaaaaaaaaaaagggggggcggccctttttttttttttttgcctttacccccattttgggattttaaaagttaagggaaaaaacacacgggttaacttttgtttcaaaaatttttttccaggcccaaagaatttttaaaaaaaaataaaaccttttttaattaaaatttgggggcaaaatttaaaaattttgggaaaggggggtacgacaccctttaatttcccgtgaaaggcc

SEQ ID NO: 13303 - DNA, 159 bp, Zea mays
  Clone ID: LIB3158-017-Q1-K1-C6
accaactttgtgcccggcaagtgagggggtggaggcgccaccgcccaccggccaccgctgcggatatctaggtgttcggatgcacgtgagcgcgcactggttccagtttgtaccatgatgtaaattacttaccgtaccagggttcaatcggcaaggaag

SEQ ID NO: 13304 - DNA, 385 bp, Zea mays
  Clone ID: LIB3158-017-Q1-K1-C7
gttctccggaatccggctgtaagactcttcttaaatcttcctcgcttggaatctcagcccacaactgcagaagtccagcccttaaacctatcgggcggaccagagccaagtcctggagtcgattctcctatcacagataaggaaactgagcagtcgagttctgtgctaagtcctggagtcgattctcctatagcagacaaggaatgtgagcagtcgagtcctgcggtgagtcctgaagtcaattctcctatggtggacaaggaaagtgagcagtcgagttctgtgttatgtgaccgtatcagagatcttgagatcagggctaaagcaacgggtgaatctcgagagtaaattcgtgatttgtccacatggaagtaagcaagcacat

SEQ ID NO: 13305 - DNA, 246 bp, Zea mays
  Clone ID: LIB3158-017-Q1-K1-C8
gggtgcatgtcttctatttctaggtatggtgcataaaaaagtaggaaccaggatgagattggaatgctgcacatggcacatcaaggggcccaagatatgtacccgagaaattatcgtaaagggcccacaactgtatgtatagatgtttaaaagtggcccaagtttggattgctcaaccggggcaatgatttacttagcctgctgaaatgtactatagttagcattcaagtttgtgaccattatgcc

SEQ ID NO: 13306 - DNA, 252 bp, Zea mays
  Clone ID: LIB3158-017-Q1-K1-C9
ctagttatattgatcctttcctttcgagcaacaatgtgtcatgttgctgtcgcgctagttagcaagttgcaattaaacgtttggaacagtgtgtcatgttattatgtgtggcttctatatggctatatgtctgctggaactgtatggaccaaccctcagtgctacctacaaaagtctatgattcgactgaatatcttgtatgattctattatacaaccaatataggacacacggcgggtgatgacctcacga

SEQ ID NO: 13307 - DNA, 229 bp, Zea mays
  Clone ID: LIB3158-017-Q1-K1-D1
tgacaaccttatcctccgagtcgagtgggcgacgccaaggcccaattagttttgccgctacctgctagaatcgcatatttctgttgaattatatcagtatgtttgtttgaattactggtacctgagtcatgaatttatcttgttggaaaaacctgttatgtgtggtttggttggacgagaataactatactcgcttcttttatattgagttcgcatgccgtttgttgtc

SEQ ID NO: 13308 - DNA, 240 bp, Zea mays
  Clone ID: LIB3158-017-Q1-K1-D10
cccactgaagtcgaacccctaatggcttctcaagttcttcttcaacaggcactgtttgcccccaagctaagtttcccttcttcttctcgtaacgtcgcgttaatttctagggttccttccaccccaatttcatggcgttgcactcctctcattgctaagcctagtttcgctgtgagagctgactccaacgtcgaaggcgctggtgaagccaccgaagatgttccttcgtataatgttgat

SEQ ID NO: 13309 - DNA, 125 bp, Zea mays
  Clone ID: LIB3158-017-Q1-K1-D11
aaaaaggaaaaaaatactgctaaaacatgaggaggctctaaataggaaagaattttgatggtaagagagaggaatgttggaaaaagaccacaaaaaagtctgaaaagggtagcttggaactggaa

SEQ ID NO: 13310 - DNA, 324 bp, Zea mays
  Clone ID: LIB3158-017-Q1-K1-D12
ttccgagagggctttttggacttcccaaactaacacaggttgagcttcaggataattatctctctggagagtttcctgaggtgggttctgttgctgttaatcttggtcagattactctctctaacaaccagctttctggggttctacctccctccattggtaacttctccagcgtgcagaagctccttcttgatggcaacatgttcacgggtcggatacctccccagattgggaggttgcaacagctttctaagattgattttagtggcaacaagttctcgggtcctattgtgcctgagatcagtcagtgtaagctgttaactt

SEQ ID NO: 13311 - DNA, 321 bp, Zea mays
  Clone ID: LIB3158-017-Q1-K1-D3
tggaagtctaaaaatattactgctattgacttttcacggaaacacacaagcagctccttcctaagctccatagatagatcatgtaagaaataaatattctacatgaatacactgtaggggaaacaatcgtgaaaatcaactagagttggtctattcatcaggatatttatgtgatttgtgagcttcaatgtattcatctaccgagataggaaacaaccaaagtataacacagtatagccgtatagtgaacatgtagactgaatgtgatattccttgtacttcatgttcctttttaagtttgatgaaggaagtttgtaagtt

SEQ ID NO: 13312 - DNA, 386 bp, Zea mays
  Clone ID: LIB3158-017-Q1-K1-D4
cacgtctcctcgcctcgttccccatttgctgcgtctccttgcccgcgccgccgctcgccgtttgcccctcgtctccgcaccgcgcgctgttgtccatccttgtgcagcaaaaatgacggctggctacattgttggctcactggtcggatcctttgccattgcatacctgtgtgacacatttatctctgacaagaaggcatttggaggtagcacccccaagactgtttctgagaaggagtggtggcaagccacagacaccaagttccaggcctggcctcgcactgctgggccaccggttgtcatgaaccccatcagccgccagaacttcatcgtcaagtccactgagtaggtttgggctggagaagctggttctgcgacttggtgcc

SEQ ID NO: 13313 - DNA, 385 bp, Zea mays
  Clone ID: LIB3158-017-Q1-K1-D5
cggacgcgtgggaagcatttcacggtttggtgcaaagctggacagtcaacaacatagcggcatgccggcatcacgattcaaccaacagaattgcagctcagcttgataaggcatgaacataaaagcattgaaggccagaaaagtgtatgtgatgaaggattgaagtttttggaaacgtagcagcatcaggatcttggagattatattatagtaggcgtacctacatttatacgaacaaaaaacgctggtcttaaaggccagaaaagcaagctaatgagcgctacagaaaatatgtgttattttgaactgcaatgttcagtctttatggaggtaaaccaaaagtactggttttgaaggggctgcagaagcatgttaagagcactac

SEQ ID NO: 13314 - DNA, 386 bp, Zea mays
  Clone ID: LIB3158-017-Q1-K1-D7
caagcaccattagcagcatgaacatggcgaagcaggcagccaccaccgttggtgctaagaacggcgctgttgctgtcgccgatcagcagaaagtagagggccccaggacgatgaactgcagtagctacaccttccacatgccgctgcactacccgaggtacaagaaggcggactacgagagcatgccggagtggcgcgtcgactgcctgctccgcgagtacggcctccccgtcgacggcgaactcgacagcaagcgaaagttcgccatgggcgccttcctctggcccgaccagtactgaaggaacccgtggcccgagctagctgaggctgctgagcctgagctaacaagagatgaagcaactgcagtcgtagccggagctagctgt

SEQ ID NO: 13315 - DNA, 382 bp, Zea mays
  Clone ID: LIB3158-017-Q1-K1-D8
cccggtctggctaggatttggagccgcattcaagcatgtcctccagaaggacatcaggaacctccacatgctccaggaaatgtacaatgagtggccatttttcagggtgactattgatctggtggagatggtgttcgccaagggtaatcctggcattgccgcactgtatgacaaactcctcgtttcacaggaactgcatccattgggtgagaagctgagggccaactatgaggaaacccataagcttctacttcatgctgctgggcacaaggatcttctggaaggtgacctctacctgaagcagcggctccgactgcgtgatgcgtacatcaccaccctgaacgtctgccatgcctacaccctgaagcggatccgtgacccg

SEQ ID NO: 13316 - DNA, 389 bp, Zea mays
  Clone ID: LIB3158-017-Q1-K1-E1
gaagatttctcaggtgtcgtgaaccctgcagagttattagaatgccacttcacagggttgaaggctctggagaatgaatatggttctggtgaaattgttaagcagggaacagaaatagttcagagagctgtcaccaaatcattccagtccctacatgaagcatacaaagggaaaattgttgggctggtaatatccacaaatgaggctccatcatccttaggatccataattgacgcaccatcttcactgcacatttcaagacggctagaagaagcaagcaagactacagacatagcctctgtcgtacttgttcgaaagagcttggcatggattacagggatcatcctgcttgtttcaactctcataggggtttgcttgcttatgaacat

SEQ ID NO: 13317 - DNA, 255 bp, Zea mays
  Clone ID: LIB3158-017-Q1-K1-E10
caacaccaatgaaatccagtgtatcctctcaatggctatgagattgatatacatcatcatctatcaaggtaatgctcagttacctgaacctatgcctaatcaaacaaccatggtgttctacctacaagacataacaaaagggtctagagccacagtgaccccagtggctggcatcaagggaagcgataggacctacaccacatttggatccatatttgtggtggatgaccctgtcacgctgagcataagcccaac

SEQ ID NO: 13318 - DNA, 257 bp, Zea mays
  Clone ID: LIB3158-017-Q1-K1-E11
ctcatatagcagatcaggatgtgacgaaaccatgtgatgtagccttatgcaatacttcagatgattgctcccatggacagtggggaaatattgtgctaaagcatttatatcagtcattaggtgatggcaatggcggcatagaggggtgcataagggaagcacttattcattatcctaaacataatcataccactacagttatggaaacttttaaaattgacaaagatggacaagaatgctctttgcaatttgagcca

SEQ ID NO: 13319 - DNA, 259 bp, Zea mays
  Clone ID: LIB3158-017-Q1-K1-E12
ttccccttaatctgtgaggaaaagggaattatgggttctctttatttcagttcaatttttccttttagtgttaaaaatattacctttattattattattattattgtgtggagattgattcatgtaatttgttgaacggttgaagatgagaatttgtggagcagcaatcagcagcagctacaccaccacgtgcaattcccttatagtgtttgcttgctcttacctctccagtcctgcaaaaaccaagttcctgccctca

SEQ ID NO: 13320 - DNA, 386 bp, Zea mays
  Clone ID: LIB3158-017-Q1-K1-E2
ccttcaactacgagtccatctacgtctccgactggagcaagctcggcttctccgaggtcgactacggcttcggcccgcccatcttcgccggcccgctcgtcaacaacgacttcatcgcctccgtcgtcttcctcaaggcgccgctcccgctcgacggcaccaggatgctcgccagctgcgtcaccaaggaacactccgaggagttcgcccgtggcatgaaggaagacctgccctgaacttgttcttcctagcttattatatactgctgatgatcatcctgagccctggctgcagggagatgatgaatggtgacgtaaacatgcttctgtttcgttgatgctgttgttacttttggttgtattttttttggggttcactttatcttg

SEQ ID NO: 13321 - DNA, 381 bp, Zea mays
  Clone ID: LIB3158-017-Q1-K1-E3
cggacgcgtgggcggacgcgtgggcggacgcgtgggttttgggcctgttggaacagaaggcctccagttgtccttttgttttgttggcaataatgtgaattctttgagttgcccacatcttatagtcgtttatgcttcattggcatggcatatccatccaaattccaaaataatgttctgatactatgttttactgtgtatgcccatgaaccattgatggatacatttcggacgttccagtatggccgtgttcgtgccttgaaaaaaaaaaaataactaaaacataaagggagggccaaaatgaatggacacgtaaaagaacgtctgccacaataatagcaaagctaacccaatgatggatgggggggcggccgttttaaa

SEQ ID NO: 13322 - DNA, 385 bp, Zea mays
  Clone ID: LIB3158-017-Q1-K1-E4
atttacatccctataaccaagggagagttttctgtcattgtatcaactttcaattacatcataccgcacctcatgggctggagcacatttgtaagttcaatcaaacccgaggagtcacggccatacagcaggccgcagtccacgtctgagtacgaatggcgaacgtgatgtgttgatcaactacagcaaaatggctgagacccacactgaagggatgagattgttggtattgtttggctgggtaatctcatatgtggctagttgatggacgcctttttggggtactccttttgtttcctttctagttcagcaggcaggtagcactacttgtatccagagtttcacggggcggttggagagggggcatattttgggcagcaaacct

SEQ ID NO: 13323 - DNA, 385 bp, Zea mays
  Clone ID: LIB3158-017-Q1-K1-E5
gccaacgggagcggcacctacatcagccgcgccgccgcgctgcccagcaagtgcggcgtcgccctgccgtacaagatcagcaccaacgttaactgcaacacgattaattaagtgatgaggcgtcctgtgcgcgtcccgggcgaggaatgcatgcatggcgctggcggagagtaataaaataatgctactggtattttaagctatatcgaggtgtgcctgtctctagtcatttattatggtgtttaggaatggtctacacagttcgtaacggtgtatcgtggatgcatgttgccgcgagcagagtacgtaggcatgaaccgatgtgtgcgcttctgtctgtttactctctctatgtagtaatgtgtgggtgctttgatccagatgt

SEQ ID NO: 13324 - DNA, 385 bp, Zea mays
  Clone ID: LIB3158-017-Q1-K1-E6
ctcagttctcacctcaatctcgcgataagcgaagccggaggaggagggtgcgaggagatcgcgagcagccggagccggagccggaggcctagaagatgaagacgttcgacccgtggccggtattcttccgccgggagtggaagcgcaattggcccttcctcacggggttcgccatcaccggcttcatcatcactaagatgacggccaacttcaccgaggaggacctcaagaactccaagttcgttcaggagcacaagaagcgctgaccaaccaggtgttgtccgaattgcctgtctggacagccagttatgttatgatgtttgaatgaaaaattagcttctttttcttcatctaaatgcgtgcagcctatgctccatttgtaatg

SEQ ID NO: 13325 - DNA, 384 bp, Zea mays
  Clone ID: LIB3158-017-Q1-K1-E7
cggacgcgtgggagagcacgcagtagtgcagcagcactgaagcactacttcctgcactcactgtgctagctgctcaaaccgtagtagtaacagtccatcaccatcaccatcaccaccaatggctcccaaggttgcgctcttccttgccctaagcctcctgttcgctgccaccgcgcatggctgcgaaccctactgttccggcccagtcgtcccaacaccaccagtcgtgccgactccgtcgtcgcatagccacgggcgctgcccgatcgacgcgctcaagctcaaggtgtgcgccaatgtgctgggcctcgtcaaggtcggcctaccgcaatacgagcaatgctgcccattgctggaggggctggtggaccttgacgccgcatt

SEQ ID NO: 13326 - DNA, 185 bp, Zea mays
  Clone ID: LIB3158-017-Q1-K1-E8
gcttcacgtcagttgctgcaatgtactgctagtccttttgcttgcattctatgcaagaggataatggaatgttcattccccattcttcaaagtttttttttttttgcaaataaaaggaggcgatcggtgttccatatttattatgttgatcataacataacattcagagaacaattcataagttc

SEQ ID NO: 13327 - DNA, 241 bp, Zea mays
  Clone ID: LIB3158-017-Q1-K1-E9
gagggactctcctccgggttcatgttcctccttggcggcattggcatcatcctcctcgacctcgccgtcgaccgcacgaggccccggagcctccgcgtctcgtttggaagcgccggcgcagtcgccgttgtcatcgcctacgccatggccatgctcttcctccgcatcaagatccccggctacctctggtgaggttgataaatcttgcctgttaactagaccagatctcgcgcgagatctc

SEQ ID NO: 13328 - DNA, 387 bp, Zea mays
  Clone ID: LIB3158-017-Q1-K1-F1
caagattggtggtattggaactgtccctgttggacgtgttgagactggtgtcattaagcctggtatggttgttacttttgggcctactggtcttactactgaggttaagtccgttgagatgcaccatgaggctctccaggaggcccttcccggtgacaatgttggcttcaacgtgaagaatgttgctgtgaaggatctgaagcgtgggtatgtggcctccaactccaaggatgaccctgccaaggaggctgctagcttcacctcccaggtcatcatcatgaaccaccctggccagattggcaatggctatgccccagttctggactgccacacctcacacattgctgtcaagtttgctgagctcgttaccaagattgataggcgatc

SEQ ID NO: 13329 - DNA, 220 bp, Zea mays
  Clone ID: LIB3158-017-Q1-K1-F11
aggctgccactgagggaaataatgatatgccgctcagtgtcaaaattcttcctgcagctgctctcaacaccttcgttcctccaggtcctctccagctcccatccaccccttcagctcctgggcctccgcaaccgtcaccacaccccttctcacacctatcttcccctgttcgaccccgtcaccaaatcatggatccacttcccccttgacttttctccct

SEQ ID NO: 13330 - DNA, 132 bp, Zea mays
  Clone ID: LIB3158-017-Q1-K1-F3
gtaccagtgagcatggaggtttggttaggcttggtttccaacaacttcaagttggcgggggaggaagactcggcttgaaggccacccgcccggtggtgtgttccgtatggttatataaccccccccggttcc

SEQ ID NO: 13331 - DNA, 389 bp, Zea mays
  Clone ID: LIB3158-017-Q1-K1-F4
gcgcaggcccagtccggtaccggcaagacgtccatgatctccctcaccgtctggcagatcgtcgataccgccgtgcgcgaggtgcaggctttgattctctcgcctactagggagcttgcttcccaaacagagagagttatgctggctattggggaccacctcaacgtccaagtgcacgcttgcattggtggaaagagtattggtgaggacattaagaggctcgagaatggggtgcatgtcgtctctggaactccaggcagagtctgtgatatgatcaagaggaggacgctgcggaccagagccatcaagcttctagttctggatgaagctgatgagatgttgagtagaggctttaaggatcagatttacgatgtctacagatatctccc

SEQ ID NO: 13332 - DNA, 310 bp, Zea mays
  Clone ID: LIB3158-017-Q1-K1-F5
gtcccgccctcgcccccatcctccttctacccacagccactgcctcgccaccacccgcctccacctccgctccacatccaccatcatccgccgcagcagcagcagcagcagcagcatgatgcatgagtatcgagtagccgcagagcagcgcgagaggatcagacgatgccattagcttattagctcctttatttatccttcttcttcttcttcttcttcccttgtaatttcagtgacatcccagttgttaaggagttgactcatcatgcagcagttaggagggattaatatgattgtgtgacctaatctc

SEQ ID NO: 13333 - DNA, 383 bp, Zea mays
  Clone ID: LIB3158-017-Q1-K1-F6
cgctgtttatgaaaacaatgcttcacttctaagagatcatgagacattgcctgatgataatcatgatggatcaactgatagggttgcggatgacgcaagtctccttgcggcgaccaatggtgttcaagcaaagcaagcttctttacatgagcatgatgcatcaactagaagtgtattgattgacaatgctcagagcttagatggtcagtttagtactactgtgtctactgatcctataaatggttttaaattggagactgaaattgcaaccaagacagttgaaacatctcaagtacacaggctgcaagatgagtttgagcaaccattagttgatgctagctatgatgggcaagaaaactctgatagcccagtttctcatccag

SEQ ID NO: 13334 - DNA, 380 bp, Zea mays
  Clone ID: LIB3158-017-Q1-K1-F7
gcgttcgcaattccagagcagtatcctctactgcctcctcaagttcgatttttaaccaaaattttccacccaaatgtgcatttcaagacaggtgaaatttgtcttgatatattgaagaatgcatggagccctgcatggacccttcagtctgtttgtagagcgataattgctctgatggcccatcctgaaccagacagcccacttaactgtgattcaggcaatctcctgcggtcgggtgacatcagaggctatcaatcaatggcccgcatgtatacaaggctggctgccatgccaaagaaaggttagatgtagaacatgtgccaagccaagagcctatgtcagtccatatgttgtcaggtttgctgtgtgctgtctgtctg

SEQ ID NO: 13335 - DNA, 385 bp, Zea mays
  Clone ID: LIB3158-017-Q1-K1-F8
aaggaagcagagacggaggccgccgcgccggcagcagagacggaggctgctgctgccccggtcgaggctgctgagccggagatagccgccgagaccaaagaggtggcggctgtggaggctaacgaggaggaggaggaggcagcgcctgctgttgctgccactcctgaggtcgcagcgaccgatgaggaagcggcggcccctgctcccgaggccgccgtcgagaagtccgtcgagtgagtccagcccagcgccggacggcggccgatctagctcgctgcgtcagcctgtcacctggcgactggcgtgcgccgcgctggtgccactgccacggcaacagcacggcatggcgccggcataggtcgctaggaaaaacctgcttttgtgt

SEQ ID NO: 13336 - DNA, 270 bp, Zea mays
  Clone ID: LIB3158-017-Q1-K1-F9
ggatagaatacaaaactcagcttctaagtgttctcaaaattagcaaggagaaagtagatgagtgttataatgcaattctgcaactctcaaaggccaataaatatggtcataacaacatcaacaacactagcaagcgcaagtatgagcaaatcccaagcagcccaagtggcgtaattgatgctgcattttgctctgatggttccaacgattcgtgggcagtggggtcatcattgatatattcaccaccagagcctctcttcaagaagagca

SEQ ID NO: 13337 - DNA, 310 bp, Zea mays
  Clone ID: LIB3158-017-Q1-K1-G1
cggacgcgtgggaaaaaaaaaaaaaaaaaaaataaaaaaaaaaaaaaaaaaaaaaaaagaaaaaaaaaaaaaaaaaaattataaagataaaaaaaattaaaaaaaaataatttaaaatatataaaatattctttattgtcaatataaaataatttcgtttgtctttttttttctaattttttttttgtaaaatcctgtggtaaaccatttttttttctttgattaaaatactcttttggcatggtgtttttttatcgagtatgttttaaccgatcgcctttctaaacagttttttatcctgtttggcaaa

SEQ ID NO: 13338 - DNA, 162 bp, Zea mays
  Clone ID: LIB3158-017-Q1-K1-G10
agtatttagtatagtcacaccttcaataaagtagttttgtttgactgcattgacatcacattgttaagaggtatgctcaactttatgtttcttatcgcatccattttgctttttatatgcctttaacgcttgtgctctttccaggattggttttctttacta

SEQ ID NO: 13339 - DNA, 250 bp, Zea mays
  Clone ID: LIB3158-017-Q1-K1-G11
actcccttaacctcatgcaacacaccatattgggaaggttgcaggatagcaatgcggtgttgtcgcatttcaacgacttctctcagcactgctttgctgaaatttccggcgacatcgctaggaacacgcggtgtttggagtctgtcaagtccgaccttgattatatctttcagaagctcaggtattcttttttaggagggtagtttgtcctgaaaactgcatattttgtgagatgttttgtggatgtaag

SEQ ID NO: 13340 - DNA, 178 bp, Zea mays
  Clone ID: LIB3158-017-Q1-K1-G12
tttgaggatacaatacaggggaaaacagtattcacttcctatggtactacgttgtatcagctatttcttttatttaccacatccaataatccagatgtttgggttcctgcatacaagtcgtcacgttggtattgcctgtttttcgtactctttgtgctggtgggagtttactttgtta

SEQ ID NO: 13341 - DNA, 390 bp, Zea mays
  Clone ID: LIB3158-017-Q1-K1-G2
cgaagtgcgagcgacccacgtccacacgacacgaaccaccaccaccaaccagcagccgcaccacgcacccagcgcaaagcgatggcgtcgctcaccatgatggcgtccttcgccgccgtggcggtggccgcgccctcgcgccgcggcaccttcgccgtggtcaggtccgccaaggtcgaccgctgccaggagcccgccacgctagcagcaaccgaggccaggcccgccgccgacggacgccgcgccgtcatgctcgcggctgctgcggcggccgtggcagccatcggcggcgccggcgccgccatggcgggccccaagaacgggacccccgaggcgaagaagaagtacgcggccatctgcgtcaccatgcccaccgccaaggtctgccac

SEQ ID NO: 13342 - DNA, 204 bp, Zea mays
  Clone ID: LIB3158-017-Q1-K1-G3
ctgagtttgatgagggtgaggaaggtgatgatggtgatgagtactagaagtatcctgatgcggtcatcgtcaggcttgtgtgctgctcttgtccccgttgtggtttgcaacacctgatgttgtaagactttctggttatgtccgccccgctgtgccactgggttattaagaacgtcgttatggatggttgtctacactacattt

SEQ ID NO: 13343 - DNA, 175 bp, Zea mays
  unsure (1)..(175): unsure at all n locations; Clone ID: LIB3158-017-Q1-K1-G4
aaaagaaaaagtgatgcagtatcattgtgttgttttttattctgttcgtcatcatacactaagcttctgtgaaaaaggaaaagtcttggacgttgttgttatgttgccattatgccattttttcatgtataagaacttactaagaatcttccattgactcggtaaaatgcanctt

SEQ ID NO: 13344 - DNA, 145 bp, Zea mays
  Clone ID: LIB3158-017-Q1-K1-G5
gttcggagctgagtctattataaacatcttggtctgagtttattgttgagtggtgccagtttttttcaatatacatttatcttaaaaacagcggtactgatgtttttttgtctaaagttaatgagtttgcaatggttctgagtct

SEQ ID NO: 13345 - DNA, 358 bp, Zea mays
  Clone ID: LIB3158-017-Q1-K1-G6
gcactgcatatggcttcatacctatagtagtagttgaatctttgttgggtggggcccaccgtccagcagacatgtaactttctcttttcttgcgctataaaagagattagagtaatgtagaaataaatcagacccaggcgaacacactcacctgggctggtacaggtctagtcaatccagaatctgtttaattccacaagttaggtcgaaccaagggttcaagtgaaccagaggtcagttagtctataacactcactagaaccaaaaggaacgagagagctatttggtcatctgtgtctcgagcaatatctgagtgtgtaatcttcttcgcctctgtttcaatcaatccatttatcac

SEQ ID NO: 13346 - DNA, 261 bp, Zea mays
  Clone ID: LIB3158-017-Q1-K1-G7
gtcagcttcagcaccacgagcaagattgtcctcgcgctcgccacgaccccacgggggcattttgcattatccccgaccacgatcaactgcacctaatactcgatgctcttcgcttgccgctttgcttttccagagaaaagctacaaagttcacaagtagataaatctttatctagaaactaaagtacgctaactgttatctgagcgcatgcaactcttgttttggatagaaaagctccaaattgcccaaatacccgtatct

SEQ ID NO: 13347 - DNA, 382 bp, Zea mays
  Clone ID: LIB3158-017-Q1-K1-G8
ggccgagcagagcacgcacagtgtgattgtgtgtgtgtctgacatggcgtcgctctggctagcgagagcgtcgtcacagctggcgcgccgtgccgccgccaggaggcctcctccacgtcctgggcgccacggctccggccaacccaccagttcgtggttcttgggctcggtgccgcaggcggcccttgggtcaccagcgctggacacaagccgccggggcttctgctccgtccggcgcttcgcaggggagagcagcgctgctgctgctgcggcggctgtcgtcgacgaggagccggagagcgggttcgcagccggcgatcagcaagtatgcgtcgaccagagcagcagctagatagattctgaactactagtatgaactttc

SEQ ID NO: 13348 - DNA, 266 bp, Zea mays
  Clone ID: LIB3158-017-Q1-K1-G9
tatcaatcgttttccatggctcgtaccaagcaaaccgctcgcaaatccaccggtggaaaggctcctaggaagcaactcgccaccaaggctgcaaggaaatctgcaccgacaaccggtggagtcaagaagcctcatcgctatcgccctggaactgttgctcttcgtgagatccgcaaataccaaaagagcacagagcttctgatccgcaagctccccttccagcgtcttgttcgtgaaattgcgcaagacttcaagaccgatttgag

SEQ ID NO: 13349 - DNA, 195 bp, Zea mays
  Clone ID: LIB3158-017-Q1-K1-H1
gattgatgcttaccttgatgggctagaggcttctggcttgagcgacttatctcgagataccagtgtcgcatccttctttgacagccgagtcgacacccttatccacgcactgctcgagaagatttgaactcctgaagcacttgccttgagaggcaaagctgccgtatctcaatccaaactctcaaatcggctcta

SEQ ID NO: 13350 - DNA, 262 bp, Zea mays
  Clone ID: LIB3158-017-Q1-K1-H10
gcatttcccatgggtaaaattgatcagacccggatgtggaaggttggtgagcgtgtccgttctacaaggccagctggtgatctaggtccattatacccatttactgctggggtctacgtggcattgatgatggcccagattgagatcctgaggaagaaggggcattcttactctgaaattattaacgagagtgtcattgagtctgttgattctttgaatcctttcatgcatgctcgtggtgtttcattcatggttgataact

SEQ ID NO: 13351 - DNA, 253 bp, Zea mays
  unsure (1)..(253): unsure at all n locations; Clone ID: LIB3158-017-Q1-K1-H11
cgacgagaatcatgccatcgtttcgtcctcggtggggcccgagtactatgttggtattttgtctttcgttgataaggatcagctcgaacctggatgcgctattttgatgcataacaaggttctctctgttgttgggcttcttcaagatgcagttgatccaatggtctcttgtatgaaggtcgaaaaggcccctttggaatcatatgctgatattggtggtttagatgctcanatacaggaaattaaagaagca

SEQ ID NO: 13352 - DNA, 390 bp, Zea mays
  Clone ID: LIB3158-017-Q1-K1-H2
caactacttgttacttggcattgcaccctaatgtcaaaggtgtatctggtaaatacttcgctgattgcaatgaagcaacaccgactgctgtcgcgagagactcagagctggcgaagaggctatggtcgttcagcgaagaacttgtcaagatctatgctgatatgtcacagacgacacaggcaagcgaagaggaggaaaccacggttacgaaagacgttttccaagacaagtagcgtaatatatgttgctgcgttttctactttttgtacatgtcctctgggcccgaatggccagtgactgtaatagcacctaagtgcccgagactggtaaggggtattcagacaatcaatcaagaaaccacggtgcggctgaggcctgaggcagtcctct

SEQ ID NO: 13353 - DNA, 363 bp, Zea mays
  Clone ID: LIB3158-017-Q1-K1-H3
gaacgaactcttgctccgatcacgagctagctgaggtcgacgatggcggctgtgctgaacagcaggaagacgccgcaggcggtggtggccgtgctggtggcggcggcgctgctggcttcgtccgcttcggcggcgatcacctgctggcaggtggggtcgtcgctggcgccgtgcatgccgtactcgacggtgaggtccagcgcgctccccgcgttgtgctgcagcggcatgcagagcctcaacagcgcggcgcggaccagcgcgtaccgtcaggctgcgtgccggtgactaaagagccttgtcaacagcgtctagagcgtcaacgtgggcaccgtcgccaccatgcccggcaagtgcggcgtc

SEQ ID NO: 13354 - DNA, 178 bp, Zea mays
  Clone ID: LIB3158-017-Q1-K1-H4
gacagattccattttagtagaagcggtggatcgacaactgcgcctcgttggtctatcttttgtccaaatggcaggatgctgccaatgggcgttgtaagcgcaatcagccaattgggtggtaatgtaagctttagctttagatactgggagatggtctgtcaacagttacttttagcct

SEQ ID NO: 13355 - DNA, 296 bp, Zea mays
  Clone ID: LIB3158-017-Q1-K1-H5
ttaccagtgttacattctacgatgacagccgactcgacacccttatcgacgaaatgcttgagaagattggaacacctgaggcacttgccttgagagggaaggctgccgtcgcacaggccaaactagcaaatcggctctaccagaagaaattctctggcccgaggtgggaggcgttggccaagaaaggtgccaagaaacagaggttgttgtgggcatccaccggtgtcaagaacccagcttatcccgacactctttacatcgacagtctcattgggacctgacacgtcaacacgatg

SEQ ID NO: 13356 - DNA, 287 bp, Zea mays
  Clone ID: LIB3158-017-Q1-K1-H6
taaaagtcatgccgggacatgattcttatattgaaccttttgttcactctatactgtatttgttaactctaaacagcaccgccttctgtttggtcatactcaaaactggcgaaaaggctatggtcgttcaacgaaaaacttgtcaagatctatgcttatatgtcacaaaccacacccgccagcgaaaaggggggaacccccggttccaaaaacgtttttcaaaacaaggggcgggcctatatgggggttcgatttttactttttgtgcatgtccccttgggccccat

SEQ ID NO: 13357 - DNA, 382 bp, Zea mays
  Clone ID: LIB3158-017-Q1-K1-H7
gattgatgcttaccttgatgggctagaggcttctggcttgagcgacttatctcgagttaccagtgtcgcatccttctttgtcagccgagtcgacacccttatcgacaaaatgcttgagaagattggaacacctgaggcacttgccttgagagggaaggctgccgtcgcacaggccaaactagcaaatcggctctaccagaagaaattctctggcccgaggtgggaggcgttggccaagaaaggtgccaagaaacagaggttgttgtgggcatccaccggtgtcaagaacccagcttatcccgacactctttacatcgacagtctcattggacctgacacggtcaacacgatgcccgaccaagctttgcacgcattcatagac

SEQ ID NO: 13358 - DNA, 384 bp, Zea mays
  Clone ID: LIB3158-017-Q1-K1-H8
ttcttctcctccacctcgtcaggcaccctcaaaccctcgccgcaagaaagaagaggtcaatcaaatcgaaccaaaacctcccgaccccacaaggccaagctcatttccatggtggtgtacacgcaggaacatgtgtaccggcacccgtgggaccgggtgacagcggcggcgtggcgcaagttcacggatccggcctcctgtacggcgctctcccacgtcgcagacgttcacaccctacaccgccgcctcgactccgacacgggccgcctccaggccgcgcgctccatcaccgtgcggtccccgccgctccctttcgtcctgcgccgactcctcccgtccgccgcggcgtccccaaacggcgccgcgctctgccactgcgtcgag

SEQ ID NO: 13359 - DNA, 248 bp, Zea mays
  Clone ID: LIB3158-017-Q1-K1-H9
caatcggtgcttcctccggcggcgcgtgggagtgtctttggcgcgtgattcctagttccccgcttacctatgcttcgctcgacccacattgtagagttcacgccggagagacggcggaatctcaccggacgatcgtgatttcgcatcttcatggcttccgcctaccggaacgaacctaattggccacggcatagaagcggtggagctggattcatgggaaaagtacctttctctaaccctaaccctac

SEQ ID NO: 13360 - DNA, 202 bp, Zea mays
  Clone ID: LIB3158-018-Q1-K1-A1
taaaaaaaaaaaaaaaaaaaaaaattttaaaaaaaaaaaaaaaaaaaaaaaaaaagtaaaaaaaaaaaaaaaaaaaacaaaaaaaaaaaaaacaaaataatataatagggggggcctttttttgggttccacgctttttttcccctggcttgcggggaaaaagctttttttttggggcccctaatttcattcccgcggcggc

SEQ ID NO: 13361 - DNA, 391 bp, Zea mays
  Clone ID: LIB3158-018-Q1-K1-A10
atggcatcaacggcactttgcatgatgatcatcagtgcggccatttggatcagctcggttcttcttcgtcgtcaaggttccggcggcttccagtgatgtgttcgccacagaacgggcagcacctgctgcaggagcaaacacttaacaacaatgctcgtcctccagagaagaggcagcgggttccgtcggcgtataacagattcatcaaggaagagatacgcaggatcaaagcgaacaaccccgacattaaccacagggaagccttcagcacggcagccaagaattgggcacattatccaaacatccatttcggtttagacgactccgggcgagagggcaagaagaagctcgtggatcatgaggcggcggcgtctgtcgtcgcagtcgcagc

SEQ ID NO: 13362 - DNA, 385 bp, Zea mays
  Clone ID: LIB3158-018-Q1-K1-A11
cccgcccccttccaagaactctagtatcaaccaaccgtccaacaaaagcaggagtcgcatcccagatcccccgcgcatcagagacaggcagggagggaaccgagatccgtccgtccgtgtcgatggagtcaacggtggagcggataagctcgtcggtgcagtcctgggtgaaggaccacgagctcgcagccatcggaggcgtgtgggctgcggcggtgggcacttcggtggcgtacagccggaggaaggcgccgcagcggggcacgggcctgcgcctcatccacgccaggatgcacgcgcaggcgctcacgctcgccgtcctcggcggcgccgccctcttccactactacggcgacggcgggcgcatgaagagggccgacgacat

SEQ ID NO: 13363 - DNA, 377 bp, Zea mays
  unsure (1)..(377): unsure at all n locations; Clone ID: LIB3158-018-Q1-K1-A12
ctcgcggagaggtaccgggacggtgtcgtgaagaggtttttcacttctgaaccgtgaattcttgatttcggctacgccatctgatttccccattctacacccgaactcacaaagaaactgtcgagtttgcatttggaatgggacagggtaagtggagaaccatgccaaatttctcatgtttgatttggtcgatgctgtggtagatatatttcggatggcagttctaagctgcaacttcgtttggagaagcatgaatctccagtgaacggtgtggaagatgagaatgcagattctttgatcccacaggctattttggactttgtgcttncagctgggtttccagggtctggttcagcggactacctggactacatgct

SEQ ID NO: 13364 - DNA, 379 bp, Zea mays
  unsure (1)..(379): unsure at all n locations; Clone ID: LIB3158-018-Q1-K1-A3
cggctacgccgtgccgcagatcgacgtgatgctggagggcgggcagaacttcacggtgctcggcggcaactccatggtgcaggtgaacgccaacacggcttgcctcggcttcgtccaggcgccggggcaagcgccggcggccgtcatcggtgggttccagctggagaaccacctgctgctgctcgacgtggacaagaagcagctcggattcaccactttcctcaacgcaatcgggctttcctgcagcagcttcaatttcactcttgctagctagtgtgctgctgcatgtatacttaactgtaacaacnttgtactgccgtgtattacaaataaataaataaaggggggaataattgattggagggttccagcttccaac

SEQ ID NO: 13365 - DNA, 390 bp, Zea mays
  unsure (1)..(390): unsure at all n locations; Clone ID: LIB3158-018-Q1-K1-A4
ccacgcgcccgaaggggctcacatatggggccctgctctcactaataacattgttagaactcacttgcgcttcaattattcagtggcttcctttctggccttcaatgaaatggatctttattggctggctggtcttgccatacttcaatggcgcagcctatgtgtaccagaattatgtgagacctgccttcataaagaaccagatggtcaacatttggtatgtccctcagaaaaaaggccttcttgggaaatctgatgacttcctcacagcacttgataagttcattgaagaaaatgggactgacgcgctgaagaaattggcgaacaaggctgggcagccatttaaacagtctgggaaatcatctaaggatcangaagagacaaatcatc

SEQ ID NO: 13366 - DNA, 269 bp, Zea mays
  Clone ID: LIB3158-018-Q1-K1-A7
cggacgcgtgggttttagactttgcgtgcgtgcctttagattttttgaaacgaaactgctgtatgtctcttccgttaaaccgttgtatgtctctacttcggttagtcgtatttagtatttaacggtgtcaagtcttgataatacgtcaagggataattatgttagtgtccctgttttagggtagaactgtatatctacccttgttttttagactttgcgtgtttgcctgtacaattattatgcttaacatgatgaggatgttatgctct

SEQ ID NO: 13367 - DNA, 203 bp, Zea mays
  Clone ID: LIB3158-018-Q1-K1-A8
attacgcttgtagtcattattgggcatcacaaaaattatggctctctgaactcgtcgattgttattacatgccatgttccttcaatccaaacctaaaaaaaagtaaattagaatgaacaaactaaaacgcataaactaaaaaaaaaacttctgcgatggactgaaacagcacacctggcataaggaagaacggctcgcctaac

SEQ ID NO: 13368 - DNA, 297 bp, Zea mays
  unsure (1)..(297): unsure at all n locations; Clone ID: LIB3158-018-Q1-K1-B1
gccgcgctgcacaaggcggaggacaacgccgccgacgaggctgaccgctggtacgcgccggtgtcacaacagccgtcgcactgaggatctgaatgtggccgttctgcgccttggctgtgatcctattctgtactccctgtttccgagttcctccagctgcgcgagctgggccatccccatctcatctgcgatgaaaaacctgtccctgttggttgtgattcacctgctgccggttccatgggaagttttggatccagcgacgacgcanggctgttaaacttgttctccacgcccatt

SEQ ID NO: 13369 - DNA, 392 bp, Zea mays
  Clone ID: LIB3158-018-Q1-K1-B10
gatgaagctcatccccggcaactccgccggcaccgtctcgtgcttctacctctcgtcgggcgacggcgacgggcacgacgagatcgacatggagttcatgggcaacgcgagcgggcagccggtggtgctgaacacgaacgtgtgggccagcggcgacggcaagaaggagcaccagttcgacctctggttcgacccctccgccgactaccacacctacaccatcatctggaacccgaccaacatcctgttcaaggtggacggcgacgtgatccggtgcttcaagcgctacgccgacctgccgtacccgagcgcgaggcccatggcgctgcacgccacgctgtgggacggcagctactgggccaccgagaagggcaaggtgcccgtggactggt

SEQ ID NO: 13370 - DNA, 331 bp, Zea mays
  Clone ID: LIB3158-018-Q1-K1-B11
agcaatccacacaagcacttcgaagtcgaacgggcgctgcacacagacacaccaagcgtcggcaccaatggcttactaccaggaggtggactactgctcggaggaggtgaggtcggtggccccggccggcttcggccgccacggcggcggcgtccagcagcacgtcgtcaaggagaagttcgaggaggtcgacacggtctcacgcgccggcgccaaccaccaccaccaccaccatggtcaccacggcggccacggcttcatggtgcgcgagaccagggtcgaggaggacatcaacacctgcaccggcgaggtccacgagcgcagggagagc

SEQ ID NO: 13371 - DNA, 389 bp, Zea mays
  Clone ID: LIB3158-018-Q1-K1-B12
ctagcggggagcgccgccgctgcagttgccgccgccaccagagcagtccacctcggtctgatatggcgaccgggagtgcaagtgccatcgcgtccttctccgtggcggcggcagcggctgctgctctgcgcgtcaggcggccatgcgctcgcgcttgcgcttgggccccctcgcagcgaccgcagcagggggcactcgtcagcctcaagccttgcgcctaactggcaccacacgctcctctgtggcggccggattcggatgccgcggggggtgttgccggcgccggcgatgtcatgggcctcctcctccgggagcgcatagtcttcctcggcaacgagatcgaggacttcctcgcggacgccgtcgtcagccagctcctcctccttgac

SEQ ID NO: 13372 - DNA, 261 bp, Zea mays
  Clone ID: LIB3158-018-Q1-K1-B2
gaggaggggaattcaacatcaagacgatgtactgctaaaattttacttgccttacactactatcgttgaggttcacgtctgcgtattgattagaaccttgtttgatcgataatccaagatactagtagtatgtgtgtggttgatgatctgtctgaaattctacacgaaaagcctgcagaggatgaggatccgagttggccatgccctctgttcttcagctcgaaatgtactgatttccttgctattgttaaggttcatatt

SEQ ID NO: 13373 - DNA, 336 bp, Zea mays
  Clone ID: LIB3158-018-Q1-K1-B3
atacctctagattcttgtcgaattgcatctatggcagtgtttagcgaggagcttcacgaccctttcgtggctgttccggctttctttgatccatgcgatggagtttgacgacggaagagatgggcttgccggcaggtgggagcagggcgcgccgactagatggcagccctgtgcgccaacgagggacgaacgtggccgggaggaagcgcacaaactctggagggcagccttgttcaccgatgagtgacggccgtggacggagagacgagacgtgcgggcatcggtgcgcggtggcgagtcaccaagatgagcggagaggtggggagcacgggaaat

SEQ ID NO: 13374 - DNA, 391 bp, Zea mays
  Clone ID: LIB3158-018-Q1-K1-B4
gggtcggggaggtattttctgggacaccggacaatcaaccttttgggatccacgcccaggggttttcaaaggatttcgtgcagtggctcaatcaaggagaggcgttttggtactgacatcgtaaggtgggcttaccatgtaaaaccaacccacacgatggttgcacttacaaaaaaaaaaaagaagggagaagtctacatgatggctgcagcccaaacctggttccaaaagcatcacaactctcaaaggccattgcaagcaaggagggcaccatcgacgtccacgagatttgcttgtcaaccatcagcattctcctcgcggccaaatatgatgacgggacttaagagtcgcacacactgttagtagacttgtctagggaagtgtaccattc

SEQ ID NO: 13375 - DNA, 393 bp, Zea mays
  Clone ID: LIB3158-018-Q1-K1-B6
gactcgttgaacccgttcatgcatgctcgcggtgtggccttcatggtcgataactgctccacaactgctcgtttgggatctaggaagtgggcaccacgcttcgattacatcttgacccaacaggcgtttgtgactgttgacaagaaagcaccgatcaaccaagacctcatcagcaacttcatgtctgaccctgtccacggtgccatcgaagtctgcgctcagctgaggcccactgttgacatctcagtgaccgctgatgctgatttcgtgcgtccagagcttcgacagtcttcataagcttgtatggatccgcagtgtgactgcaatggctagtttgtaagaacttaatatgcctgggcttttgaactcttagattgtgcctgtattgctcat

SEQ ID NO: 13376 - DNA, 368 bp, Zea mays
  Clone ID: LIB3158-018-Q1-K1-B7
ccaagcccgcacgacacgacaccaagtcgaggagctcgagagggcaccaataatggccggcgtgaactccagcgtcgtcgggctcaagcccgccgcggcagtgccgcaggccgccgccgcctcatcgccggcgaagcgggtgcagctggccgcgcccgagggccgccgcgccgctctgctcggcctggcggccgtcttcgccgtcacggccaccaccgggtcggccaaggccacgatcttcgatgagtacctcgagaagagcaaggccaacaaggagctgaacgacaagaagaggctggccaccagtggagccaactttgcgcgcgcctacaccgtggagttcggcagctgccaattcccctacaact

SEQ ID NO: 13377 - DNA, 345 bp, Zea mays
  Clone ID: LIB3158-018-Q1-K1-B8
tgctttaactatctcaaaggttctcctgtcaatctgctcactgctcacggacccaaaccctgatgatcctcttgtccctgagattgctcacatgtacaagaccgacagggccaagtatgagtccaccgcacgctcctggacacagaagtatgccatgggctagaagcaaggctaaaagctggccaaactggtgaatgtgccggaccccaaatcgttatcacctaaataaccagtcaagtcacaagtatgaatggacttttgaggaccattgtgccctgttgaactcatgtattaccttgtgaagtccgttgtgtctggtttctacctgaccgtttcgttatctgg

SEQ ID NO: 13378 - DNA, 372 bp, Zea mays
  Clone ID: LIB3158-018-Q1-K1-B9
aagaaaatcacttgatgctccagtggataataatgatgactttatcccatctgaaccttgggaagatgacaacttttgcaatgaccacattgatgaaggacatgtgtgtagtgatgtagaagagccagtaaatcttatcaataaaccgagacaggtcaacaagattgatatacagtatgacaaggtatcaaaacaagtggatgttcatgctttaaaagaagtgctttggaatcacatccatgcatctgctgagactggtcaggaaagagaggaacctggaccaccgctgcgcctatctcaggtgttacatgaccttccaagcagcagcccagatgctgtagcaactgatatttcgccacacctgtatttcat

SEQ ID NO: 13379 - DNA, 273 bp, Zea mays
  Clone ID: LIB3158-018-Q1-K1-C1
ggcggcggctgcgactgcaacacctgcaagtgcggcaccagctgcggctgctcctgctgcagctgcaactgagccggcccggcgatggcgcacgagtcgagaggacgacgacgagtcgtataaatatagtagcggcgtctaaataagatcctgtcaactgcacacgccattatcgatccatggtcgctcctggggttcatgttcatctgtaacgtgctcgcggtcttgtccgtctcgtgccggatttaatatttatatacatgtattcgtgtc

SEQ ID NO: 13380 - DNA, 389 bp, Zea mays
  Clone ID: LIB3158-018-Q1-K1-C10
cggacgcgtgggcttgaaaatttcccagagagggtctacaaatcaatgctacttcctctgatgatggaggacaatagggcaggtgaagccacccaaaaaggattttacaagtatgagggcaagaggaaagcgactcctgatcctgaaattatgaaatatattgaaaaatctaggagcatggcaggagttacaccagatcctgagctgatgaagctaagtgagaaagacatagtcgagatggtgtttttcccggtgataaatgaagcctgccgagtccttgatgagggtatcgccgtcaaggcttctgacctagacatcgcttcgatcttcggcatggggttcccaccttataggggaggtgtcatgcactgggcagattccatcggcgc

SEQ ID NO: 13381 - DNA, 389 bp, Zea mays
  Clone ID: LIB3158-018-Q1-K1-C12
cggacgcgtgggcggacgcgtgggcggacgcgtgggcggccggcggcgggagtgtggtgaaggtcgagtccacgtacaagctgctgccgggcgtggaggtgaaggacgagatcgccaaggccaaggagtccgtcaccgccatcttcaagggtgccgaggcctacctcgtcgccaaccccgacgcctacaactaaaccattggactgggatgagcttcatttcccttccgtcttgtttggatatagaagggtattgtgtacggagattgggttttctctccccttttttttgttttcatacaaaataaaataaagctgctctaaagcagcgtgcggtttttggactcgagatggtatgagtatatgtacgtgctgtccttgtgtgattat

SEQ ID NO: 13382 - DNA, 367 bp, Zea mays
  Clone ID: LIB3158-018-Q1-K1-C2
ctccaacaaggcaacaatccaccggcaccaacccagcgcggcgccaccggcgacctataccccctcccccggagagcgatggcgacggagctgacggcggcgcatctgcgcgcgtacgacggcaccgacccgtccaagcccatctacgtctccgtccggggcaaggtctacgacgtcacctccggccgcggcttctacggccccggcggcgcctacgccgtcttcgcgggccgcgaggccagccgcgccctcggcaagatgtccaaggacgaggccgacgtctccggggacctctccgggctcaccgacaaggagctcggcgtcctcgccgactgggagaccaagttccaagccaagtaccccgtcg

SEQ ID NO: 13383 - DNA, 352 bp, Zea mays
  Clone ID: LIB3158-018-Q1-K1-C3
cggcgacgggcacggcgcggcgaacggcacggtcaacggcaacgacgtcgctgtcgccatcgcggtgtaacagtaatgaactggaggatagggacgaacgaacgactggtaggtgtggcgtacctgccgcgtgcccaccggccggccatatatatcgaatcccggcccggcgcggcagcacgtgctattgttacgtgtcaccagcgtacgtgtctgtgtagtgcctcgatcgtatctgtacgtctttaggaaaaggtgtgtccgtgtgtattgtatgtgtgtgagcaagcgtgcgtgacgcgctctgcctgtgtgacaaagcaaagcaatacaagctcaggcattttctgtc

SEQ ID NO: 13384 - DNA, 388 bp, Zea mays
  Clone ID: LIB3158-018-Q1-K1-C8
ctcaaggcttacttacaagaatgttcctacgtggcatagggacctgtgcagggtctgtgaaaacatccccattgtcctctgcggtaataaggttgatgtgaagaacaggcaggtcaaagccaagcaggttactttccacaggaagaagaatctgcagtactatgaaatttctgccaagagcaactacaactttgagaaacctttcctgtacctcgcaaggaagctggctggtgatccgaaccttcactttgttgaagctgttgctcttaagcctccggaagttaccatcgacatggctatgcagcagcagcatgaagctgagcttgctgcagcagctgcacaacctcttcctgatgacgatgatgatctgattgagtagaaaagatca

SEQ ID NO: 13385 - DNA, 389 bp, Zea mays
  Clone ID: LIB3158-018-Q1-K1-C9
ggcttggtgagcaaagcggggggcaacagcagcgggatccccgtgctggtcgacgaagacgacccgctcgcgctcgagtcgtttctaaacatcactctggtgaacaaggcagggcgctccgtaagcttgaagatggatgtctccagagcctacttcgtggcttacgtagcagggcagcgctcgtgcctcctcaagagatcaggccgcacgttctcgtcggcgatctgttactacggtggcccgtggggaacaagttcggctcctgtcacgcgacctgctgctgctgccggcgacggcgaggatcctggggtcgcggcatggcgagcgagagatctcgacgaggccatctcgtcgctgttcctgttccccactggcaacgctaccgaaga

SEQ ID NO: 13386 - DNA, 297 bp, Zea mays
  unsure (1)..(297): unsure at all n locations; Clone ID: LIB3158-018-Q1-K1-D1
ctggaggaagaggtctgagctagtaattggagtggggtattggtggtggtggcctgggtctggtgagtggggacgaaccgacggacagcagtgcagacaagtcacgacgagctaaaagctggtgacctctctctctgcttgcttgcttgcttgtatattgccaagaaccctccataagcagaggcagtcaggaggagactggcgtgtgcagtaattattcatgcatgatttggcacaatcagtcaattgagccccngntnaaaatatatagattttactataatggtaacttaattg

SEQ ID NO: 13387 - DNA, 336 bp, Zea mays
  Clone ID: LIB3158-018-Q1-K1-D10
cggacgcgtgggcgacccacgcgttcgcccacgcgtccggtgcagtggtgttgttgctttggtttcatttctggatgcatgcgtcatctttcatacttggatctaagtgtgcagtagtcgtaaatgattggaatttctgttttagtttggtgcccattcgatctcgagtcgattttcactcatgtaatttgcaaatcttgtacgaagaaatgatccaataaaattcagcatttgtgtcaaaaaaaaaaactaaaaaaagacatgaacaagccaaacaactaaaaaaaaaaaaaaaagcatgacaagccaaaaacaaaaaaatattcggggcggccg

SEQ ID NO: 13388 - DNA, 387 bp, Zea mays
  Clone ID: LIB3158-018-Q1-K1-D11
cggacgcgtgggaggaaagtaacaagctggaaagcaagaaccaagatacattgttggatgcatagatcctgcatggatctgcaatagaatctacagcacaccacattatatgcgaaggtaaaattgagaagtgaacaatgctcttaggttaaggtggaaaatggaacatcttgagggaaatactcagtgcaagcttcagttctgaacacgtccttgattcttttagtcaagcttggtgtgttcagaagtctgtggtgttttttttgtatatatagaaaattgttagcaggcaagagcatttcagttgattttgttggtcccagacttatcatttgattgcggtcctagtacttgaatttttgctgcgtgcctaaagtcgtatgccta

SEQ ID NO: 13389 - DNA, 380 bp, Zea mays
  Clone ID: LIB3158-018-Q1-K1-D12
gtgagatggcacaagccatggcgtccatgaccggcctctcgcagggcgttctgcccagcaggcgcgccgccaacagggccaggacggccgccgtcgtcagggcgtccgccgaggcgcaggcgcaggcgggccgccgcgccgtgctcgggctggtggccactggcatcgtcggcggcgccttgtcgcaggcggtgcacgccgagaccgtcaagaccatcaagatcggagccccgccgccgccctccggtggactccccgggactctgaactctgaccaggcgagggacttcgacctccccttgaaagagcggttctacctgcagccgctgccgccggcggaggcggtggcgagggtgaagacgtcggcgcatgacatcatc

SEQ ID NO: 13390 - DNA, 388 bp, Zea mays
  Clone ID: LIB3158-018-Q1-K1-D3
aaaagtcatggcatcagttatttagtcgttcagcatcagtgtctccttgtcctgacgttacaacttcagctcatgatatggttcggaaggcagaaccaaatggagctcaaatatacaatgctcatacatttctctctcagtatccgcctctggactacaagccaagttcaagccagtctatgcaatttccaggttttccaccgcttaatggagcaccttccagtaacccactacctcattttcctgctggacatatgcctttctatgatgatgcagaatcaacactacttgaagaaccagagcaatttgaggacccatgctatgatccagatgcaattgcattacttgggccagtttcagaatctctagataacttcccgttggactt

SEQ ID NO: 13391 - DNA, 191 bp, Zea mays
  Clone ID: LIB3158-018-Q1-K1-D6
gccgtaacatcttatctgccatccaaacttcatttgaactgaagtaatattgtaaccagactagtatggtggggttagcttagctacatgatcatgctccttttccttatcgctgtattatactaaagatgaagtggaacacccatcgatctttcttgttctttcgcggaaaatctgatgcttgatcaccg

SEQ ID NO: 13392 - DNA, 352 bp, Zea mays
  Clone ID: LIB3158-018-Q1-K1-D7
ggacgccggagacgtcgcgggagccgtgcccggaccggatcctggacgacgtcggcggcgcgttcgggatgggcgccgttggcggctccgcctatcacttcatcaagggcatctacaactcccccaacgggatgcgcctgtccggaggcgcgcagaccgtgcgcatgaacgcgccgcgcgtggggggcagcttcgccgtctggggcggcctcttctccaccttcgactgcgccatggtgtacgcgcgccagaaggaggatccttggaactccatcgttgcgggcgcagccacgggcgggttcctctctatgcgccagggcatgggggccgcgggcccgtccgcgctcatggg

SEQ ID NO: 13393 - DNA, 393 bp, Zea mays
  Clone ID: LIB3158-018-Q1-K1-D8
caccgctgttaggttctaccaggagaccttcggcgtccctccggccacgcgagctcgccgaaatggtcgcccacaggttccatcagtaccaggtggtgggtcgcgcgctgccgaccccaaccgatgagcaccccaagatctaccgcatgaagctctgggccaccaacgaggttcgcgccaagtccaagttctggtacttcctgagaaagctcaagaaggtgaagaagagcaatggccagatgcttgccatcaacgagatctttgagcgcaacccgaccaccatcaagaactatggcatctggctgcgctaccagagcaggactggttaccacaacatgtacaaggagtaccgcgacaccaccctgaacggcgcagtggagcagatgtacaacg

SEQ ID NO: 13394 - DNA, 377 bp, Zea mays
  Clone ID: LIB3158-018-Q1-K1-D9
cgaaccgcccctcagtcccttgcacaccatggccgctgcctcagcttcgcttctccacctcgcgaccccgaccctgactcgctccactcgcctcgccgtccgcctccccagcgcccagctgtcgcgctggccatcgggggcacgcatcgccgccgcgcagccgccgcgggcgtacaaggtgacgatcgagcacggcggcgagtcgcgggtggtggaggtggcggaggacgagacgatcctgtcccgcgcgctggacgagggcctggacgtgccgcacgactgcaagctcggcgtgtgcatgacgtgcccggcgcggctggtctccgggacggtggaccagagcgacggcatgctcagcgacgacgtcgtcgcggcgg

SEQ ID NO: 13395 - DNA, 387 bp, Zea mays
  Clone ID: LIB3158-018-Q1-K1-E10
atcgacaccggctaaccctagcttctgtttggctgttgcctggcgggtggcggctgctttggtgcgctgcgcagtgcgctccgtccgtcgaccggccggccgtcccctggcccctgctcgtcgtcttcctcgggcgctcgtcttcctccgaacgcgcgcgggccgccgacctgcttgttctcctggagaagcgcgcccggcgggcaggcgacgcagtccagcggcgggttgaggaagaaggcgagcgaccggcggatccccgtccagccgtcccctgctcgtcttcctcgggccgagcgctcgtcatccactcttcctccagccctccatcggatccccgtccgaccgtccccggctcgtcttcctggtgctcggctgctccagtgc

SEQ ID NO: 13396 - DNA, 390 bp, Zea mays
  Clone ID: LIB3158-018-Q1-K1-E11
cggacgcgtgggttgtacctctattggtcagtgatgatgagaagatacttgttgtgtgtatcaactgtttgacaaagaaattgtaacgtaaatggtaacagtaatgattcacactcaaataacaacgcttgttgggcgcctttcccaagaggaattgattgataaattgcctacatttctgccagcattatttgatgcttttaacaaccaaagtccagatgtccgaaagactgttgtgttctgcttggtggatatgtacatcatgcttgggaaagcattcgctccatacttggaagggcttagcagcacgcagctccgcctagtaaccatatacgctaaccggatttcgcaggcgaggtctggcaagccaatcgattctaaccaatgaga

SEQ ID NO: 13397 - DNA, 308 bp, Zea mays
  Clone ID: LIB3158-018-Q1-K1-E12
cccacgcgtccgctggagcactttgactctttgagaggcttacttttatgctgtctagttttccatcttctgttgagtcgagaaaacaagaaaggctgtgtagccaagggatgacttttacccttgtgccattcttttccctgtcgtggtggggggtgggttgcggttgatgcttatttatgcacagtttttgcttgggtcggggctggggctgggacgttggtgtaatgtggtgaataagcgagtgcatgcaacgcaattggaacttaagacatttttggtaaaatactctttcgtattctgttctc

SEQ ID NO: 13398 - DNA, 393 bp, Zea mays
  Clone ID: LIB3158-018-Q1-K1-E5
gccggactggccagcggcaggatatgtgctgtggagaacatcgcccagctggtggctccggaggcagaaggcccggccgatgccacggccacggccacgctggctgcttaacggaccattgtgccattgttgctgtgagagagatgtgcgtcagccaacatgtgtgctattgctttggcttatttgtgttcagaatccacttaaactcggtcgaagtgagctttccgttcggcaacgtctgtactcttacgaatctcgatcgtgtatgtctttaagtattgtgttgtgtttcaaagataaaaaaaggtgacctttgtgtatgattttttatacacgttgtctcttagctgcattgatagtctaaggtctcagaattgtaccatgcaatcatag

SEQ ID NO: 13399 - DNA, 359 bp, Zea mays
  Clone ID: LIB3158-018-Q1-K1-E7
gggatcgtttctcgctctggtactttgacatatgaagcggtgtttcaaacaacagctgtaggattggttcactcaacttgtgtcggcattggtggtgacccgttcaacggcacaaattttgctgattgccttgaaaagttcgttaacgaccctcagacataaagtattgctctcattgctgaaattgaatgtacagctgaggaggatgctgccacattcattcaggaaagcaaaacacaaaagcctgttgttgcattcattgcttgacttacagcaccccccgtccgtcgcatgggtcatgctagaactatcgtctcaagaggaaagggtacttgccactacaaaatcaaggcactcag

SEQ ID NO: 13400 - DNA, 305 bp, Zea mays
  Clone ID: LIB3158-018-Q1-K1-E8
cggacgcgtgggcgctgtcgtttttgctcgcggttcccaggccttcagtgcccgtcaccgttgtttatagtaacagatattgattcttgacaaaggaattgtaggatattgagatagatgatagtatatatgtgaaaggttctatgtaaccattatatattaatattttgtatgtagtggcaacacatcacgactctttgacgatgattaatgtgaactacttcaaggaattgatgcgtacgagtctgttgttgcattcattgctggacttacggcacccaccgtccgtttgatgggtcaatgct

SEQ ID NO: 13401 - DNA, 392 bp, Zea mays
  Clone ID: LIB3158-018-Q1-K1-E9
ccggttgattaacccgaagcaccctctgtgtctaagcctccagcttcgcttgagaagacgctatcatttgagattcgagcttcccacttcgaccagcccagccctacatcggtttttgatgtacaatttgaggatatcagcgagaaatcccccatttcatcagaaagtgcaattactgctaaacaagagcctctatccaggtctataccaatcggatcgatcgcgaggaccttgtcgtgggacgacgcttcccaagaggctcctccgcagtgttgtaccaaaggagacaacagccacgagcaggagcagcacgagttcgtcgagaagaccctggcatccgctggcttctgcaacgagaagacccatgacatcttttgcccgtggcattcgct

SEQ ID NO: 13402 - DNA, 389 bp, Zea mays
  Clone ID: LIB3158-018-Q1-K1-F10
ctcgagttcaacttccgctggacccgccgcagcctcgccgtcgtcggcctcttgggcctcgctgtccccatcctcgtctacaagggcatcgtccgcgaattccatatgcaggacgaggatgcaggtcggccatacaggaagttcctgtaagcggcgtccagggctgcagaatacgtcgattcctcgaccggggctgcgaggaggggagtttctattcagtttgtatcggtattgttttagtctgaatctgatgaagcaatttggaatgctgaattattgtgcctgatccaaatgaataaggtgtaatgactcgtcttttcaattgctggctcttacattccatgtatactctgcttcaacataatatgtagttgtgtctactggttttt

SEQ ID NO: 13403 - DNA, 392 bp, Zea mays
  Clone ID: LIB3158-018-Q1-K1-F11
gctgggcagcttactaaccttgggattgtgtcctggatgtcgaattgtgttgccaaggttcttcaatctttctcactgagctggcctgcagcatttgttgtccttcaggcctcgtacttctttattcactatatatttgcaagccaaactgcacatgttggagctttatactcagcatttcttgcgatgcatttagcagctggtgtgccagctctaatgtcggcacttgctttggcatacaatgcaaacctctttggagcactaacacactatagtagcgggcaatctgcagtatactttggagcggggtatgttgaccttccggatgtattcaagctgggttttataacagccgcaatcaatgctgtaatttggggagttgctggtgcatt

SEQ ID NO: 13404 - DNA, 349 bp, Zea mays
  Clone ID: LIB3158-018-Q1-K1-F3
tgctcctcgacggaaacaccctcatctatttcggcaacagcatccccatcaacctggtggtcgccgtgatcgcggaggtcgtcctcgtcggcggcgccgagtactaccggatcatcaacggactggacctcgaggacaagctgcaccccggtggccccttcgaccccctgggcttggccagcgaccccgaccaggccgccatcctcaaggtgaaggagatcaagaacggccggctcgccatgttctccatgttcgccttcttcatccaggcctacgtcaccggcgaaggccccgtcgagaacctcgccaagcacctcagcgaccccttcggcaacaacctgctcaccgt

SEQ ID NO: 13405 - DNA, 380 bp, Zea mays
  Clone ID: LIB3158-018-Q1-K1-F5
ccttggtcctggtctcaacaaggcaggcaagttcccgaccctggttactcaccaggaatccctcgaatccaaggtgaacgagactaaggcaaccgtcaagttccagctcaagaaggtcctttgcatgggcgtcgccgtcggcaacttggcgatggaggagaagcagatccagcagaacatccagatgagcgtgaactttcttgtttcccttctgaagaagaactggcagaatgtgagatgcctttacgtcaagagcaccatgtggaagccatacagggtgttctaagtatgctcttttgtgaagtctgctaggttctggcaccgaggttttattgaattaaactcttgttaaggatatgtttttggacgatcctatattt

SEQ ID NO: 13406 - DNA, 286 bp, Zea mays
  Clone ID: LIB3158-018-Q1-K1-F7
cggacgcgtgggctttttatatggtaacttattttttctcatgcagtgcatgtgacttgaaactttgttaggacatagtttgtgaaagggaaatggacccaacattttctatagtcgattttggtatttgacgtctgtctcataaaaaaaaaaaaaaaattaatgaaaaaaaaaacaaaaaaaaaatataaaaaaaataattataaaaaagctataaaatgagtaaaaccaaccgatccatccattttccatgcacacgtcttgtcaagtttattgattagtaagg

SEQ ID NO: 13407 - DNA, 228 bp, Zea mays
  unsure (1)..(228): unsure at all n locations; Clone ID: LIB3158-018-Q1-K1-F8
ctttatttaaaaaaaaaaaggatcatctatattgtgttccgncttttttaagtacaaacggtactattgcagtaatattttttggggggggaagccgtacattacccgctcacatttctcattgcacactgatctatatgtacaccatggaagaacatgtcaaatacaaaaaggcataaggggttccttgtttattccttctattcatatgcataacgcattcgaaca

SEQ ID NO: 13408 - DNA, 387 bp, Zea mays
  Clone ID: LIB3158-018-Q1-K1-F9
tgcatctgcatgggcttggacctgcctgctttttaggatcttccggagagccaatacccctcttgtcatccttggcacgtttccaacaggtctggctttgctcatcgagaagaagagcaggaggattgagatatccctgtactgtcttgccagagctatcgagagttttttcacatggatgaccgatgcaggactctgccctccaatacttcagataaagcgagctgatgtggttgtgttcagcatagctacctctatcattatgcactgctatgcgcaggaaagagaagtcttccggtccaagtacctgaatgtgctggactgggtatttggtgtgccgccaccacccgacagtgaggataagaactgctatctaccagatgaagc

SEQ ID NO: 13409 - DNA, 391 bp, Zea mays
  Clone ID: LIB3158-018-Q1-K1-G10
gtgccaggccactgaaccactatctacgtttttgcagtatataacttatggccacatgattgacaatgttgtccttattgtaactgggacactgcatgagagagatgttaacgaacttttggagaaatgccacccattgggcatgtttgacagcattgcatcacttgctgttgctcaaaacatgcgtgagctttatagattggttctagtcgatacaccactggccccttacttctcagagtgcattacatctgaggatttggatgacatgaatattgagattatgaggaacactctctacaaagcatatcttgaggacttctacaaattttgccagaaactaggtggtgcaacagctgagatcatgtgtgatctcctttcatttgaagct

SEQ ID NO: 13410 - DNA, 395 bp, Zea mays
  Clone ID: LIB3158-018-Q1-K1-G11
gccacatcgctactcttaaggaatcaatagacttgggatcaaatgtgcaaggctacttcgcttggtctctgctggacaactttgaatggttcgccggcttcaccgaacgttatggcattgtctacgtcgaccgcaacaataactgcacgcgctacatgaaggagtctgccaagtggttgaaacagttcaacgccgcgaagaagcccagcaagaagattcttacgccagcttagaaatcgggggcctcatgatgtgggtgcagcccataaaaaactggtgtgtagtttggaaccgaaaattttctctgtttttgcgccacgagaggttctggaggcatactctccagcaccgtggctaataacgcattgttccaattcagtctggccttgtcatgc

SEQ ID NO: 13411 - DNA, 385 bp, Zea mays
  Clone ID: LIB3158-018-Q1-K1-G12
cggacgcgtggggggatcgagagcgcggcggaggcgatggcgagcggagggaagggactcaacgcgactggggagttcttccggcggagggacgagtggaggaggcaccctatggcggggaaccagctgcgccacgccacacccgggctcggcatcgccatcgtcgccttcgggatctacctcgtcggcgaggccgcctacaaccgcctctaccgcccctccggcgacaaccaccactagatcgccggcaggatccgtgactcggtcaagaagctagagccaactttaccaagcactggtgctgttgatgtttttacagttttgagctcataaggtcagccatgaccatattgtaatctgtgaccaggttgacttgcccactggt

SEQ ID NO: 13412 - DNA, 393 bp, Zea mays
  Clone ID: LIB3158-018-Q1-K1-G3
cggacgcgtgggcggcgatgcagttctggcggtcgtcgacgcgcggcacctcgaggcaccggtgcggctcgccgcagaagaagttgtacgagtaggtgaagttcttgaggtgcggcaggccgcagacgctctccggtatctcgccggcgagcctgttgtgcgcgacgtcgagctgctccagcgcccgcatgttgccgatcgtgtccggcagggtgccggcgatgctgttgaagctgaggtccagcacggtgagcttgtccagcttgccgatctcgggcgggatgcaggaggagatgccgctgttgagcaggatcagctcgttgagcgtggcggccatgtcgccgatgctgctctgcaggcagccgctgacccgctgcatgttcgccagcacga

SEQ ID NO: 13413 - DNA, 399 bp, Zea mays
  Clone ID: LIB3158-018-Q1-K1-G6
ggaactgcaaagagcctggccacatggctaacagctgcccaaatgaagggatatgccgtaactgtggcaagtccggtcacattgcaagagactgcaccgctccaccagtgccgccaggagaagtgatcctttgcagcaactgctacaaaccagggcattttcgtgaggaatgcaccaatgagaaggcctgcaataattgccggcagagcggccaccttgcccgtaactgcaccaatgatcctgtttgcaacctgtgcaatgttgctggccatctggcccgtcagtgccccaagtctgatacattgggtgagaggggtgggcctcctcccttccgtggtgttggcgctcccttccatgatgttggcgctcccttccgtggtggcttcagtgacgtggtct

SEQ ID NO: 13414 - DNA, 373 bp, Zea mays
  Clone ID: LIB3158-018-Q1-K1-G7
ctgaacgccagctgcgatgcccccttcagggcccgcctctcggcgctgctggccgccgaggggagggacagcgtccggtgcgtcttcaccgacgtcagctggaacgccgtgctgacggcgtccagcgacctcggcgtgcccgcgctcggcatgatgacggccagcgccgcctcgttacgcgactacatggcgtaccgcaccttgatcgacaagggctacctgccggtgaaagaggagcgcaaggaggatcccgtacccgagctacccccgtaccgcgtcaaagacctgctccgggtcgacacgtccgacctggaggagttcgccgaactgctggcccgcaccgtcaccgcggcgcggcgcgcctcggggctca

SEQ ID NO: 13415 - DNA, 390 bp, Zea mays
  Clone ID: LIB3158-018-Q1-K1-G8
ctcgcgatggccaaggttgcagctccaaatatggccctgaaggtgcttgacatggcgatgcaagttcacggcgcagctggtgtctcgtctgacactgtcttgtcgcacctatgggcaacggctaggacactgcggattgcagacggccccgacgaggtccatctcgggacaatcgccaagctggaactgcggagggctaggttgtaagttgtaactcgagggcgatgtacagctcgcccgtcttgcgaatgaataaagaaggaacatcaccctcgtcatttaacgtccataggtgaatacttagatgaataagcaatgaatgaataaatagtaatgactatataggatgtattttccctactttcagtagcagttactcttattttcaat

SEQ ID NO: 13416 - DNA, 89 bp, Zea mays
  Clone ID: LIB3158-018-Q1-K1-G9
gtaaatgtattaatcctactgtctcagtaaatgcgctggcttggaaataatgtaaatgatggaacatcatggaacgtttgtttcccttc

SEQ ID NO: 13417 - DNA, 143 bp, Zea mays
  Clone ID: LIB3158-018-Q1-K1-H10
atttttgagtccctttaatatattgccgtgtatatagggtattctgcacatcgccaaatgtggcgaggtcttatacagatttctagccatttaactgtggaaaattgcaagagcaaaactatgatattttttcccggacgcct

SEQ ID NO: 13418 - DNA, 279 bp, Zea mays
  Clone ID: LIB3158-018-Q1-K1-H11
tgtccatgtacggcaacgcgtggggggacctcttcaagggcgccttcctgtgggccaaggagggcaaggactaccgcgagggcgccgtctcgctgctctaccgcgccaccggcctgctcgtgcccggcatcgcgtcgcacagccccagggactacgtcaacgccgtccgcctcggcagcgtcgcctcggcgtagcttttggattgcatgttcgtttccatgcatgtgtatcattgcatgcaataattggatgaaataaacagcaataagcttcatcagt

SEQ ID NO: 13419 - DNA, 372 bp, Zea mays
  Clone ID: LIB3158-018-Q1-K1-H12
gcaagcaagcagcgagtacatacatactaggcagccaggcagccatggcgcccaccgtgatgatggcctcgtcggccaccgccgtcgctccgttccaggggctcaagtccaccgccagcctccccatcgcccgccgctcctccagaagcctcggcaacgtcagcaacggcggaaggatccggtgcatgcaggtgtggccggcctacggcaacaagaagttcgagacgctgtcgtacctgccgccgctgtcgacggacgacctgctgaagcaggtggactacctgctgcgcaacggctggataccctgcctcgagttcagcaaggtcggcttcgtgtacccgggaggactccacctccccgtgctactacgac

SEQ ID NO: 13420 - DNA, 385 bp, Zea mays
  Clone ID: LIB3158-018-Q1-K1-H3
ggatgcgacaaacgttggggatgaaggtggttttgcacctaacattcaggaaaacaaagaaggccttgaactattgaaggcagccatagaaaaggctggctacactggaaaggtggtcattggaatggatgttgctgcttctgagttcttcggtgagaaagacaagacttatgatcttaatttcaaggaggaggtaagaatcacaacttcttattatgtttttgtagttttatttacctagagctatagctattccttatgttattctataggggtatggtaatacatgaacatttgttttatattaacatgtactcactttcttggctagaacaacgatggctcaaacaaaatttcaggcgacagcctgaaagacctgtacaag

SEQ ID NO: 13421 - DNA, 317 bp, Zea mays
  Clone ID: LIB3158-018-Q1-K1-H6
gttccaaccttaatgcactgccaaattgtggtggcatttttgcgtacaatgctgtaactgtacagttgtgtgtgaagtcaaatgggcaggctgcattactcggaaaaaaaaaaaaactaataaaacacaaaatcacgtaggacagccactataaataattcaacgctccacacctcggcaagcgtacgctgggcgtatctattggatcgcatattcgtatgcatgcgtgtgtattattgcatgcaatagttgggtgaaaaaaacaccaataccactctttagtctctaaaaaacaaatctgtttttaccagaaggcg

SEQ ID NO: 13422 - DNA, 380 bp, Zea mays
  Clone ID: LIB3158-018-Q1-K1-H7
cccaactgatgagactcttgtggcccagatcaaggaagggtttgaaagcggcaaggatcttgttgtgactgtccagtctgctatgggggaggagcagatctgcgcgctgaaggatgttggccccaagtaacttacctgccttggaatactgtatctcaaaacctaaatcgaaaaaagaagtgtatcaaggattgctacagagacatccatctggcttgagctggcttttgctatggcaaacacaagtgcagggatcgctgggtgttgcaccgtgtctgcattatctgtggttacattctggaccctgtattttctatggttttatgccccctactgtttagtattaattatcaataaatttgtttgggacggttgaattg

SEQ ID NO: 13423 - DNA, 389 bp, Zea mays
  Clone ID: LIB3158-018-Q1-K1-H8
tgatgggtccttcatagagccaaaagagagcgctttggtatggcactatcagaacacggatcatgactttggctcgtgccaggcaaaggagctagtgagccatcttgagcgagtcctatcgaacgaacctgttgtcgtgaggcgtggccatcagatcgtagaagttaaacctcagggagttagcaaggggatttccgtggacaagatcatccggaccttggtcagcaaaggggaagtaccagaccttttgatgtgcatcggaaacgatcggtcggacgaggacatgttcgagagcatcaacagagccacctccatttccgagcttcctgccgctccagaagtattcgcctgttccgtttgccccaaggccagcaaggcaaactactacg

SEQ ID NO: 13424 - DNA, 368 bp, Zea mays
  Clone ID: LIB3158-018-Q1-K1-H9
gtttcgcgtctgcctcagcccgccgcaaggagaggtaagttcaggagacatcttcgagaagctgaaatggctcctaaagctgctcctgccaagaagggtgatgccaagacccaggccttgaaggttgccaaggctgtgaagtctggggcagccaagaagaagaccaagaagatccgcacgtctgtgacatttcaccgccccacgaccctgaagaaggctagggaccccaagtacccacgaatcagcactaccggaaggaacaagcttgatcagtaccaaattctcaagtacccccttaccacagaatcagcgatgaagaagattgaagataacaacactctggtcttcattgttgacctcaaggcaga

SEQ ID NO: 13425 - DNA, 98 bp, Zea mays
  Clone ID: LIB3158-003-Q1-K1-A11
aaaattaccgtaatgcttaaaaaaattattaaaataaaaaactaatatcctaaataggacgaatatataaaaaagaaacataaattaaggtcgtacat

SEQ ID NO: 13426 - DNA, 89 bp, Zea mays
  Clone ID: LIB3158-003-Q1-K1-A7
accgacgcgtgcgtattctcgaagttcaaaagccgctggaggatatcactgacagcctcaatgtcgctggggttcgagcctcgaattca

SEQ ID NO: 13427 - DNA, 399 bp, Zea mays
  unsure (1)..(399): unsure at all n locations; Clone ID: LIB3158-003-Q1-K1-C2
ttctactccaaaggagctggccaccgttcccaagtcccagggggctacctgccatttacttggggggagaaaccgtcaagtggaggtgggaaaggcaccaatgaaaagaaatcatttgcttgctattgcaagcttccgcttgggccgatgaaccaaaaacatcttggtgccccgccaaagaaagccacttgagccaaaaaaggagaataaaaatgaaacggttgaagataagacccctgtttggtctattcagtcattagtgaattgctactacttaagtgctngttctatgtttttttgcggtaatggaaatagagcccagacaaacattttgggtgtctactgtttgatgcctngtactnngttgcgaactcagctatctaatggggtatttgattc

SEQ ID NO: 13428 - DNA, 101 bp, Zea mays
  Clone ID: LIB3158-003-Q1-K1-C3
gtccgcaggcagcgcagcctcaacccgtcgccttggcaagcaaccccttggtcttggcggaaggcttcttcttcttctggccaacggcttggtcggcaacc

SEQ ID NO: 13429 - DNA, 146 bp, Zea mays
  Clone ID: LIB3158-003-Q1-K1-D1
acggacatacccacccatgactctccttcttttttccacccattcctttctcatctccccccgcgctctataccctctagctctctccgcttccaccaatttattctacccctcctcaaagcttcaattcaccaacctttcctccc

SEQ ID NO: 13430 - DNA, 128 bp, Zea mays
  Clone ID: LIB3158-003-Q1-K1-D3
gacacctcggcccctttgggacttgacccaaaggcccttcaaaaaacttcaagggggggatgggaacttttacccccccgtccaaaaaaaaaaaggctttggttttgccaaggcccaaaatggccaac

SEQ ID NO: 13431 - DNA, 336 bp, Zea mays
  Clone ID: LIB3158-003-Q1-K1-D4
ccttggccggccatgatgcttccacggccgttggcccttaacttctttttccgttcggaaacggtaatccttttactccggcaccaaccaagttggaacccgcccaattgccggacaagaaggtccatttccgttcgggcttccgttgaaaagttggccgccgggaacgtttggacggcccactagcctgcactggaatttgggttgaaggcagcggcggcgggcttcgtaaccggtaagaggaaggccaccgaggtagcccacgcgtaggttctggagaaatattgttcataaaggagatacggtggttgatgccacatgcgggaatggcaatga

SEQ ID NO: 13432 - DNA, 341 bp, Zea mays
  Clone ID: LIB3158-003-Q1-K1-D5
cgaagccgttgcggcacgcgtcccgtttttggttggttggcttgtggcccccaaaatctggccaactaatgggaggcacccgacctgatctccaatcccgaaacgcgccgtttcgacggcggatcggtttcttctgcttctactgcgtgatctttgggcaagacgataagacacgtccaagcgtcgccacagtcaagggcggcttggttgcagtcaagatggggaaggacggagagtctgccaagctgaaggaggagaagaagtccaaggaagagatccatatgaaggtcaagagcaaggacgagcggtccggcgaggaagacggcaaggaggagatcgag

SEQ ID NO: 13433 - DNA, 343 bp, Zea mays
  Clone ID: LIB3158-003-Q1-K1-E4
gccaattatttcccggggccagaacctgcacaataaacttaccaagtgccggccttgcagcggatggcccggttggaaatggatggcttcgttgttctttaatcaaacaatccacccactcattaaacaatcattaaccacccagaatttgggggtaaaggtcccggtccaagttaagggtttgaaaccggcggttaacaaactttggggtccgggataagggatggggtgtgtggtgagtgaacatgctttagtagagaatgtgcgtggttgtacttgattctcgtcttaacagaagtcatgcatacataatgctatgttcttccatagatgatggctccca

SEQ ID NO: 13434 - DNA, 414 bp, Zea mays
  Clone ID: LIB3158-003-Q1-K1-E6
gtttttcagtgtgctctggggagtttggccttgatgttgaggactacctgacaggactgggctgaatgtccaatgaatttcctagatttgtagtaaatcgcgtcactgctggcgactatgactgtcctaaaagggttttgggcttcttgcccgatcttcatgcttcgtttaggatgctgaatctgcgcaatgacttcttgcgtaagaaatttgatgggatgaagtatgatttgaggagggtggaagaggtctactatgatgtgaagatccgtggacttgtacctgcgtagttgaaacaagagacttagaatccttggtaatgttagattgttaacataccgtggtttgggctttttgtcatccataacgtgttcatctagctaaaatgtgaaaaatattctggtggagcgtatg

SEQ ID NO: 13435 - DNA, 147 bp, Zea mays
  Clone ID: LIB3158-003-Q1-K1-E8
cggacgcgtggggctttcttaacattttctaggaggaaaggctcagtttggtttctggggttagagcttccagattttttgttgttgttgatttgttgatccagtcttgtagcagtgtcatgacttacataaagttatcctctactg

SEQ ID NO: 13436 - DNA, 83 bp, Zea mays
  Clone ID: LIB3158-003-Q1-K1-F1
acccttccgaaaaaaaaaaaaaaaaaaaaaaaaaaaaaaaaataaaaaaaaaaaaaaaaaaaaaaaaaaggggggggctatat

SEQ ID NO: 13437 - DNA, 202 bp, Zea mays
  Clone ID: LIB3158-003-Q1-K1-F2
atgatcccagccggcttcgttttgaccataaccggagggccttaaggggggttttgggcctgggtttcaccccaaacctaaccaggcctggactggggtccaaccccttcggcagggaattattggttaaggacctgggggttatgggggaccatgaaaatgtcactggttggattttgccgaattttaaaaccttggtgga

SEQ ID NO: 13438 - DNA, 322 bp, Zea mays
  Clone ID: LIB3158-003-Q1-K1-F3
tggaccaaggcgtcggtggttgggggtttttttggtttttttttttattaattgggtggaaatggatgggttttggtggggaaaaaaaaaaaataaaaaaaaaaaaaaaaaccaaataaaaaaaaaaaaaaaaaaaaaaggatagaaaaaaaaggaaggagaaatttgaacatgaaagaataaaagaaattagaacaaaaaaaaaaaaaaaaagtgtgttttttttgggggggggggttttaaggggacaaagttttattaccgtgggttggaaattaaaaattttttttttggggcccttaaattaaatttatgggggggg

SEQ ID NO: 13439 - DNA, 259 bp, Zea mays
  Clone ID: LIB3158-003-Q1-K1-F5
aatctgtgctgcccagaaatgattaataaaactgacacgtatgccagtattttgtaccattcagcattcaccgatgagatgacccaaggctaagctcaaagcccagactgttattcggaatcaacctatcactcaagactctagatacaaaaaggaccagagatatagcgggtggaagcttttttgttcgggtattgtcacgatttatagacggataaagtaaaatatttatagagtatatgtgtacgtgtaattgtgt

SEQ ID NO: 13440 - DNA, 186 bp, Zea mays
  Clone ID: LIB3158-003-Q1-K1-F6
caatttccaggccagaatcgcgcagctgaagagagagctttctcaaacggactcgacgtatgactctgaaaagttggcagagagaattgcaaagctttctggtggagttgctgtggttaaggttggagcatcgaccgaggcagagctagaggaccgcaagctccgcattcttcgcctagatcgcga

SEQ ID NO: 13441 - DNA, 334 bp, Zea mays
  Clone ID: LIB3158-003-Q1-K1-G10
cggaaaaaaacctaccaacctggaaggcatttgatataatatctctatcaactggggtggacctctctggtttatttgaagaatctaataagaagagagaatccaaattcacatctaccaacacaagctcgacaatcatatcgaagatcgaagatattgcaaagaatttgcggttgaatttgacaaagaaggatggtggtttgttaaagatggaagcttcaaagcccggaaggaaaggggtaatgggtatcgatgccgaagtatttgaagttagccctaactttcatcttgtggagataaagaagacgaatggcgacactctagagtatcaaaa

SEQ ID NO: 13442 - DNA, 142 bp, Zea mays
  Clone ID: LIB3158-003-Q1-K1-G11
tcacgcgcgcgggggacgtcatacttattatataaagccacttaaacgaaatactcaaagtgcccatttacaacctcatgactgccaaaactctggcgtaacccaacttaatctccttcgcacacattcaatattatcccag

SEQ ID NO: 13443 - DNA, 280 bp, Zea mays
  Clone ID: LIB3158-003-Q1-K1-G2
gttctggaggctgttgcagttaacatttaagggagtgggagaccgcgaccccaattaccggcttgacttttgttcttgcaagccgagacccaaatttaacttggcaaggggcctttagtggccccgggggtggttttacttaacgtttcaacggaattggccgaatggccctaatggggtacaataaaaaaatatgcgtatactgctaaaatagtttagcacaatatatatatagtgtaatagaagaaacaagcaaggcgagcatttcgttcgtgatcgt

SEQ ID NO: 13444 - DNA, 258 bp, Zea mays
  unsure (1)..(258): unsure at all n locations; Clone ID: LIB3158-003-Q1-K1-G4
tcgatgcaatcgtagtgttagcgacttctgatcataacacgtacatcgttcgctttttggaggatttaaaaaacaataggctgctttttggcttactaaagaatgccgcctggtcgtggtacatacaccatcatggtattttaccctgattcggattgtgttgtgtatgatcctgtaaaattncgtacaccctattgggtgagcacacactgacactgttgcggtcggaaattctggtaccagttgtctggattgctg

SEQ ID NO: 13445 - DNA, 261 bp, Zea mays
  Clone ID: LIB3158-003-Q1-K1-G6
tccccaacgcgctttgggagctggtcgagccgttttcgagaatcgacagcgccagaggcacggggctcctcgcgcttgtcattctcgtcctttcgaacgtggcctccaatgtccccactgtcctcctgctgggctccagagtggcagcgtcagcggctgccatctccccggagtcgcagaagaaagcctggctcatactagcgtgggtcagcacggtgtccggcaatctcaccctcctgggctccgccgccaacctgatcg

SEQ ID NO: 13446 - DNA, 414 bp, Zea mays
  unsure (1)..(414): unsure at all n locations; Clone ID: LIB3158-003-Q1-K1-H10
catgacttccgacgaccaactcccctgcgcctgttctggcgtcatctcgtgtaacaccagcttcgtgcacgcgtccctcacatcaggctacatgtccggcgcgccctacacgttcgcgcgcccgcatacggattcgggtgggtcaggggcactagtctgaggttagcggcgggacaagcgtcggtctcataggcggatgcttgtgcggactcggcgcgtcataccagatgtgctggactttgctcggaactcaacgtttgccttcacgacgaccatcatctccaagggcctttcatgggaggaatggncgtgcgtttctgttctctcatgccatgaacgtatttgtggaggcgaacgacgatagacaccttatgacagggatacacacaggttgctgatatctactgtaatgac

SEQ ID NO: 13447 - DNA, 424 bp, Zea mays
  unsure (1)..(424): unsure at all n locations; Clone ID: LIB3158-004-Q1-K1-B2
actagttctagatcgcgagcgatctagaactagtaaagaacaccagactaatccgaggctgtttgaggcccaactggtccagtttcttggttcaggtgctgctggttggccatgacgcacgcagagcaggctcagctcctctggggggtagtggcagtctgttgcttgttttaagacgatgttgctccggacaagcagctttgtcttctgcacgaggaatttgtgcacacatggcaatgaaaagatccttgaactgctgtcttgagctgtcgttctcgctccatggtttccaatctagttttgatttgtattctctgttcatctaattgttccaatacggtagtagacacatttcaaaacccgtgtttttttgttttttgtttgcttaaaaggcaaaatttacttaagtctncatgcatacacg

SEQ ID NO: 13448 - DNA, 179 bp, Zea mays
  Clone ID: LIB3158-004-Q1-K1-C10
tcaaaccaaaccaaatcttgtgatctagctccttcagatatatggagcgtgtatgttggggtggctatatctacatgtcttagtttagtggatataccctttggtccccaaaagatgtaggccagtattgtaacactactattaatggttaaggtgaatgttccttgtagccccccaaa

SEQ ID NO: 13449 - DNA, 284 bp, Zea mays
  Clone ID: LIB3158-004-Q1-K1-C8
gcgagagcttggccaagaggaggtccaagctttctgccgccgtcaaggcttctgctgccacctctttttaagaatattcagtgttttgggatctttgtaaggtctatctcgttacagcgaaagtgcctctctacttagatttatgagtaattgttgcttttttgtatgaacatggttatggcttgtcggggtaccagaggtttactatgttggtttatgctgtgaacgtaagcgagccatattctctggtatgcagtctgaactattaattgaaaaaaaaataa

SEQ ID NO: 13450 - DNA, 152 bp, Zea mays
  Clone ID: LIB3158-004-Q1-K1-F4
cggaccctgggccggacccttggccggacccttggccggacccttggccgtggctaataacgcattgttccaattaagtctggcctggtcatgcatgcaataaataaagtgatgggtttccctgtttcaaaaaaaaaaaaaaaaaaaataag

SEQ ID NO: 13451 - DNA, 264 bp, Zea mays
  Clone ID: LIB3158-004-Q1-K1-G10
tcgcttactcgtgttgctgactcttgtgctgactcgtgggcgccctttttttttttttggttggtgttttttttttttaaaggaatccgaatagatcaacattaccacttctagtattccgagagcgaacaaccctcaacacgtctattggttcaccaagctcgcttcaaaacgagttgaatcatcaaaccgattaagtattactattaggaagtcaaaacttaaaaaaaaacagattcccttttgactttttattatcgcatt

SEQ ID NO: 13452 - DNA, 252 bp, Zea mays
  unsure (1)..(252): unsure at all n locations; Clone ID: LIB3158-004-Q1-K1-G2
ccgtccgggatattattatttgtgcctttaatggtcagaagcaccaggtatcatgttaaataacctatgctatagaagaaagggtgttgataatatcggatgtaccaaagtgatctatgantttgattgggatgatttaccggaagagcccattgaagtggtcttctcgatacccgctgaaggaggagagtacccaattggtttcttgcaaaaagttcgagccctgtctttatgtatgtgtgcagtgggaaa

SEQ ID NO: 13453 - DNA, 343 bp, Zea mays
  Clone ID: LIB3158-004-Q1-K1-H11
aaaaaaaaaaaaaaaaaaaaaaaataaataaaaaaaaaaaaaaaaaaaaaaaaaaaaaagggaaaaaaaaaaaaaaaaaaaaaaaaaaaaaaaaaaaaaaaaaaaaaaaaaaaggggcggccgccctttttttttttttttaaaccaaccatgcttaacgctttaaataaaaaccgtccagccgtttatacccaaactccgccgtccccggttttgttgccaattaacaactaaatcggacttaatgcggttaatctgtttaaaccccggcttgagaatttttaaaaacacccaacctatggggggcgttactactattaacaacatgaccccccgttttttt

SEQ ID NO: 13454 - DNA, 181 bp, Zea mays
  Clone ID: LIB3158-004-Q1-K1-H5
tttgcattttctggttccagggattgacttcgtactcacagtttacttcacacagaaggtttatgtagccatcctgtgataacatctactttctttttgatccaataaattggttattcagcttcaaacaaaaataatatctgctatgggtatggaagcacatatatgaaaacaataaccg

SEQ ID NO: 13455 - DNA, 253 bp, Zea mays
  Clone ID: LIB3158-004-Q1-K1-H6
agacaaagaacccaatccatccaagccaagccaaggcagtaaaagaagaaaaagagggggaaggggaagcattcgcagcatgtcggatgggactgccaactgcgtggacatcctgatcgccatcatcctgcctccgctgggggtgttcctcaagtacgggtgcgggcacgagttctggatctgccttctcctaaccttcctcggctacatccacgggcatcatctacgccatctacgccatcaccaaaaacaa

SEQ ID NO: 13456 - DNA, 326 bp, Zea mays
  Clone ID: LIB3158-005-Q1-K1-A11
gcggttcgattgacatacaggccagtgcacatgatcacattagacgatgaagtagagtccttcccgccggaagcccgtgtctattgatcgattcgagcctcacaccctcgggaattccgtgtaaggtgttaataaagcagatgggcgttcctggctgagaacatgatctgaactcgtgacccccctttttctgtggttctgtattttgtctgatttgctagaaataaaaggaacacatgctaatgcctgacagacgtttgtgtacatgaaattttgcatgggtttgttacttgttgatgctgtacctgcttgtttgagctcgcatg

SEQ ID NO: 13457 - DNA, 272 bp, Zea mays
  unsure (1)..(272): unsure at all n locations; Clone ID: LIB3158-005-Q1-K1-A7
gcgagatcatctctatggaaggatatggaactgatgcatacctctacttatcgtgactaggagattcggaggaacccttgacttaatcgattcagaagaagccattcctgtagttaggactctatttgctttctcaattaccgtgctggtatgcaaatattgttttgaaggctagccacctattagtttagctgtctgtgccctacttgttatctntgntggtcattcatcaactcgatggaatgtgatcataattcagaataggtttgctt

SEQ ID NO: 13458 - DNA, 322 bp, Zea mays
  unsure (1)..(322): unsure at all n locations; Clone ID: LIB3158-005-Q1-K1-B6
ctgagtttgtttagtcctgtattattccctcgccctacctcccggtctcaatttttttggcttgttcttttgtcttcacttcgtagtaatttgtaggccgaaagcttttgctgatacattgccctggtgtatagtagaaatgggtaataggtttacaagtatattgagctgcaagttagaccctctccaacaaggacccgtaaacggttctctacgctaaaacgttcgctatgctatacagtgcactcttgtccgctaaatctggtggacgagctcggctcgctattcctgccnnnnnaaaaaannnnnnnnnaaaaannng

SEQ ID NO: 13459 - DNA, 361 bp, Zea mays
  unsure (1)..(361): unsure at all n locations; Clone ID: LIB3158-005-Q1-K1-C10
cgcggacgccgtgggcgcctcgccgccgcaagctcgtccgccttgctccctcgaaggccttggtccgtccgtgtatcctcgacctcctaccgccacagaccccgtttcacccgctagagttatacgttcctctgctagcgatgggcgatcanagcggaccaagtgcggagaagaagatcgcgtacgacaagaagctgtgcagcctgctcgatgagtacaccaaggtgctcatcgccctcgccgacaacgtcggctccaagcagctccaagacatccgccggggcctcaggggcgactcggtggtgctcatgggcaagaacacgctcatcatgcgctgcatcaaggtctacgccgagaagac

SEQ ID NO: 13460 - DNA, 228 bp, Zea mays
  unsure (1)..(228): unsure at all n locations; Clone ID: LIB3158-005-Q1-K1-C7
ctccaacagttttgagacttgttagaactagagcaaatcgtgttaagatgttgccgtgggtgcgattctatagcaagaattccatgacaaagattgcttggcacttgattgctgctttgtttgcaagctggctggccgggattacccctgatttttgttgggttctggaacatgtnaaaaaaaaaaaaaaaaaaaaaaaaaaaaagggcggacaatctaaaagaacca

SEQ ID NO: 13461 - DNA, 353 bp, Zea mays
  Clone ID: LIB3158-005-Q1-K1-D2
cccaacgcgagcagcagttgcattggaggcgaggaggacccaccccgggcctcaaggaatggccgttttccgccacctcgccgccggcccaacctgccaccaccaccaccacggcgtcgcggcagccaccgcctccttccggctccatcgcctccccctacccttcgcccccttcgctccgctccgtcccgtcccgctcttaccaggttatgcgactcagcatgacataggtcgaccacgtcagtcacgcgcccatggaagtctaagtctcactaacctgaaaggcctgttcgcagacaaacgctactatgtactgcacacgcgaaaacctcggctgaagacctcagaccatc

SEQ ID NO: 13462 - DNA, 373 bp, Zea mays
  Clone ID: LIB3158-005-Q1-K1-D8
caaacgtgcctcttgttgcattgacacacatgtacaatacaatcgtacatatagtacgttttattcgacaagcagcctctgcatgcaataatagtacaacccccgatttaattaattggactaatgcatgctgaggatggatcaaatggagatgctgctggggatgcccctcccggtgactcccggcttggagaagggcttgagcagctcgtacggcacgatcccggcgccgcagcggttcttgaagtccaggttgttgttgcactcgtcgatgaacccctcgatctccttcatcctgccgccgaacttctcgaacgccgccttcaccatgggctccgccagccacgatggctccgcgaactcccccatgtac

SEQ ID NO: 13463 - DNA, 99 bp, Zea mays
  unsure (1)..(99): unsure at all n locations; Clone ID: LIB3158-005-Q1-K1-E4
gcaagaaacgaataacacctgttatgttgtcagcgtcgctactgataatcggttctgttggtgcaatgctactataataatcggttgtggtgcccanna

SEQ ID NO: 13464 - DNA, 337 bp, Zea mays
  Clone ID: LIB3158-005-Q1-K1-E6
cgagattgttggcagaggtttcaccttaaccggctataacgtctagttgatttccagtgatttaagacctgctttataaatcgacactttagctgatgcttgtcgaaacgacgatgatacctgccttccttcacaattttgtttcttgtaagagtctacctagtgctgaatgccagcaaagacgggcacatggttgcaacattgcctcaataatttgcccgcgcaattcttgattttgatgcatgtaattctttgtcagttgcatgtgctgcagtccctgcgtgcagactcatttcgtgtctttcgttctgcccacaaaataaattctttctgcgtt

SEQ ID NO: 13465 - DNA, 267 bp, Zea mays
  Clone ID: LIB3158-005-Q1-K1-F11
ctgagcccgacagaaccggtttggtcgatttgggacctggtaggccggtattttttttattgaagtctaactttctaaattaggtcttattggtttgtgttggattgcgccaggaatcctttcaagtttatataaattttttgtaatccttagtgttttttgtaatccttattggttttctaaattaggtcttattggtttaagtgagaaacaatccggttagaaatcgtttcgatccactaatcctaaacaatggattgacacctt

SEQ ID NO: 13466 - DNA, 162 bp, Zea mays
  Clone ID: LIB3158-005-Q1-K1-F2
gccaaccaacccgtccgggaaaaaaaaaaaaaaaaaaaaaaaaaaaaaaaaaaaaaaaaaaaaaaaaaaaaaaaaaaaggggggggatggggggggccgttttaaagaaccaaagttacctaccccggcattccaaggtataagttttctaaaagggaaacc

SEQ ID NO: 13467 - DNA, 268 bp, Zea mays
  Clone ID: LIB3158-005-Q1-K1-F3
gcacaacgtgcgggattggctacgcgtggttgctgccaacaaggaccgcaacgtctatgagcgccgctacttcaacattgctgagaacgagggcgaggaagaagattagattgcactacgcttatattttagtattgaactcgttgcattttgatacctgtacccgtagtttctcaaatgttccatgttatggtgtggtgaatcttggatgcttaatttgaagaatccttatgtactgaatctctgcaaaaagctatgttgtggacag

SEQ ID NO: 13468 - DNA, 337 bp, Zea mays
  Clone ID: LIB3158-005-Q1-K1-F8
cgcgagtggccgccctttttttttttttttttttttttttttttacccacgagaccagggggttcgaagcgctaacaaaggacgagccagcgttatcaataattcaatccggacggacgatcgactgttccgattcacctcattttaccagtccatgaatcaaaacaacagaatcatcacctacaccgaaatacttatgcccgatccaatcgcagcacgaatgaatgcgtcgacaatttctcatgcgaccacgaaggcacgaactacacactttttttttgttgccggtctcacagcaatcgtctcctactcccggcattgctgtaggggagcttaa

SEQ ID NO: 13469 - DNA, 311 bp, Zea mays
  unsure (1)..(311): unsure at all n locations; Clone ID: LIB3158-005-Q1-K1-G1
cgcaaagctaatgacgaagaaccaacaggaagtgatgcttggaatttttgccttagtgtaaactgctgcaggatgtagattcagctgctgccggttccaaatcaatctcgcaaccccgtggcagatcttgttcagaagccagcggcccaacatgccggcttgtaagcagcatttgtctggcaaaaaaaatgctgttaatatctgtccatgtgattattctatttttgcacagtgagaatacagctgttgtatcggaataagtaggcaacaataccgtgggtattatacaactgggttcgtgtgnnanaaaa

SEQ ID NO: 13470 - DNA, 298 bp, Zea mays
  Clone ID: LIB3158-005-Q1-K1-H1
caaagctcgcaactacttcctcccctcccatccccttccttcccttccggccgcctcttgtcctcctcacctcccaaattgaaatcctcctccctccctccccgcctagggttccgcttcctcccccgtccgagcaccactcaagcagcggtggcagcctggaagcagtcccatctcgtcgccctagacttccctgccggcgcacgtctcagtttcttgttcggccgctctcctgccggtccgcccatcgcctgaggttcttacggtgccacggagttggcaactgcaaggagtgata

SEQ ID NO: 13471 - DNA, 232 bp, Zea mays
  Clone ID: LIB3158-005-Q1-K1-H2
gtcggcgaggagggcaggaagaccgaagaccgacccgtgcgggggttcggaacggaaccgggccaggaccccaaaatttaaaatctttcttgccggcccgcccgtgcccgtgaacccgtcgtttttgccggccgggccccacttcggccttttcttcttccagggggatcggatacgccacaggctgcgcgatggtgctgtgggtcttcggctacggcttcctcatctggaa

SEQ ID NO: 13472 - DNA, 412 bp, Zea mays
  Clone ID: LIB3158-005-Q1-K1-H4
cagccaaacaagcatcactacctaaggagccactacaaaatgacgagggggctgtcacagtggtagtccgcatgcctgatggtagtcgtcgaggacggcgctttctcaaatctgacaggcttcagtatctttttgatttcatagacatcagccggactttcaaaccaggaacttatagactggcgaggtcttatcccaggcgtgccttcactgaattggagagccagatgtcactgagcgatctcggtctcactagcaagcaggaagctctgttcctagaaaaactgtctgcgtagagtacaaaggttctggagttatggtcgagtagtatatgcacttataaaatcggtcatttagatcgtgccttgcgtgtgttcatgaaaatactgcagcggttgaatgattactgatc

SEQ ID NO: 13473 - DNA, 203 bp, Zea mays
  Clone ID: LIB3158-005-Q1-K1-H6
ctcacgcgtccgcggacgcgtgggatcgcgagggccgcccttttttttttttttttttttttaaaaaacaatgcgtgggggaaatttggaagaagctcaaataggtggacagacattttgaataccagtattcatcccaaaaagatgatgcggtccacataatctggcggtccttgtctataaaggtgccgccaattaaactt

SEQ ID NO: 13474 - DNA, 386 bp, Zea mays
  Clone ID: LIB3158-006-Q1-K1-A1
gactagttctagagaagagagaaggtggctgtggcatatgacatagtggtagggccaggaagaaaggaggcgggcaggcatcaagttctgttcaatcgtgtggggcctttgtgtcactgttgatgtgtgcagtgtgtgcttgatgcttctccctccactgtttattttcgaggcgacggcgatgttttggtttggtagagactcaaggacggacaaaatggcagaaagttgccttggctttgtgtgacgtaaatgcagttgttctccggtatttatatggcaaataatattgggccagctagtgaaaaagacaggcagatgatttaaaaaaaaaaatttttaccccaccttaaaaatcgggggcctcatgttggggtcgcacccat

SEQ ID NO: 13475 - DNA, 395 bp, Zea mays
  Clone ID: LIB3158-006-Q1-K1-A4
gtgccgcgccacattcagcttggtgtgcgcaacgactaggagctgaccaaactgacggggggtgcgactatcgaaagcgacagcgactatgcctaacatccatcagcatgtgctcgccaataaggctgccttctctaaggccagtgcagacgacgacaactactgagactgcttgctgtagaaatgatgcgaccaccgtctcgctttgttggaataggatgatgttgtcttcgatctgggaggagtcgcttatacagggcaagagaattagattacaatctgattttttgaatggaatgcgaacgtggctatgaatctcagaattgtatgctcgttcagaaagaaatggaaagacttcgtgatacacgacgctgatgccgcatcatattcatcgt

SEQ ID NO: 13476 - DNA, 100 bp, Zea mays
  Clone ID: LIB3158-006-Q1-K1-B2
gaaggatgcacctgtctgactgactgcaagttactggtaatggtgtggtgtctgactgactgcaagttaccgccaaatacatatttcttgatgttctttc

SEQ ID NO: 13477 - DNA, 300 bp, Zea mays
  Clone ID: LIB3158-006-Q1-K1-B8
cggacgcgtgggcgattctttcactttcttttcttttgttttcttttcttttttgggtcctcctcaccatctccaccccacccgtccacttctgcgttccttcgatggatctggcgagcccgcggaataaatgagagtttttggatatatagctagggcttaacctcgtcgacttgtctgtaaaatcgaatgagacacatatataaacctatgttgttttaaaaaaaaaacaaaacaaaaacacaaaaaaaaaaatagtagcagaaagctacagactaattatgaaaaaatctgtaatag

SEQ ID NO: 13478 - DNA, 400 bp, Zea mays
  Clone ID: LIB3158-006-Q1-K1-C1
tggcatggctggtgctggacggagaccgccccaacgagaagctactgcctccgccatcggatctgcccaaatgttagacgacacgaggaattgctggcctagtcgtcgccatcaacggccgtgattgatcggcccggaccatcttggaacagggattgcgtgctctctaatttgcacaggatatcttaccgtcttttgcttgtgctggggttggtgttatgcttccatttagtggtgtgctttttccggcttgagtcgtcgtctggttagctgtgtgagagacacgggcaggaaggtccgttgatgctactagacagacgccatttttttttattatactttgagttactaccatcttttgtactgcctcagtcctaaaataattgacattcttgttttt

SEQ ID NO: 13479 - DNA, 109 bp, Zea mays
  Clone ID: LIB3158-006-Q1-K1-D4
aaaaaaaaaaaaaaaaaaaaaaaaaaaaaatttttttaaaaaaaaaaaaaaaaaaaaaaaagggaagggtgaaaaataaaaaacataaaaaaaaaaaaaacaaaaacag

SEQ ID NO: 13480 - DNA, 238 bp, Zea mays
  unsure (1)..(238): unsure at all n locations; Clone ID: LIB3158-006-Q1-K1-D5
tgtaaactaggatgttatcattatgtcttcacggtcacggtcatttcttgtcttcagctctgctgtataagtttgggaagagcctacatgagatgtaaataatattagagttaagctgaaaataatgtatctcctaatacacaggtagtttagtgtcactttttttttaaaaggacttggttcgcatctttttcttgacaaaaaaccaanngnntgagataatgttaaaatttaaaaa

SEQ ID NO: 13481 - DNA, 163 bp, Zea mays
  Clone ID: LIB3158-006-Q1-K1-E10
ctttgatagctctgagaatgagcttgccatgctcgacctcgtacaagtgtttgttgaaacattggacatgtgcttcaagaatgtatgcgagcttgacatcgtatttaacttcaacaaggcagcagaaatggtgatgcagcttctgtgtccctctagatcgcga

SEQ ID NO: 13482 - DNA, 305 bp, Zea mays
  unsure (1)..(305): unsure at all n locations; Clone ID: LIB3158-006-Q1-K1-E4
ataacctgcaactggagtgacagaatttcttttccccgcagtagacaggtgtgcgttattggttggaattatctccagtccactatcaattttttttccttggattttgattcattttatgtttcgatttgttgccttatatactgtaaagtcattggaaagaataaataaaacacgaatgttttttttgtcaaanaacaaaaaaaaaagaaaaaaaaaaaagagaataagactaaaaaaagaagacctgcaaatggtatgcactgaaacatatgaaaagagaacatcaataagattttattttt

SEQ ID NO: 13483 - DNA, 85 bp, Zea mays
  Clone ID: LIB3158-006-Q1-K1-F12
aaaaaaaaaaaaaaaaaaaaaaaaaaaaaaaaaaaaaaaaaaaaaaaaaaaaaaaaaaaaaaaaaaaaaaaaaaaaaaaaaaaaa

SEQ ID NO: 13484 - DNA, 80 bp, Zea mays; identical to SEQ ID NO: 12159
  Clone ID: LIB3158-006-Q1-K1-F8

SEQ ID NO: 13485 - DNA, 237 bp, Zea mays
  unsure (1)..(237): unsure at all n locations; Clone ID: LIB3158-006-Q1-K1-H11
gaattccaggtcgagcccagaccgtacgcgtccgcagacgcatgggtttgctgttaaatttcgtgtaagttggtcctgccgatggagaagcgagcagccccctttttttgttctatcaactatgctgtaatgctggctatgtatcggcaaaaacaattctatatgctgagtaggagtcggcaaaaattcatatatgctgagttggagacagcnnagtgcgctcgtgtacaactggtg

SEQ ID NO: 13486 - DNA, 298 bp, Zea mays
  Clone ID: LIB3158-006-Q1-K1-H7
cctcgatgagatcaaggatcgggcacgctaggcgcaccgccatcgcgagtttcatgatcacgcatcatggactcgcctactactgtggatttgtatgccattatagacttggtgctgcgaaagactgctttggtgatttgtgggtttgttgctgtgtaaaaagatcctcatggcttccagaagaccatgaaggtttggatctatcatgtaattccttgttatctgccaattatgtatggactatggacatgtgttgcgctgttcaactcactacaaataagtaatcgatatattccct

SEQ ID NO: 13487 - DNA, 331 bp, Zea mays
  Clone ID: LIB3158-007-Q1-K1-A1
gcgcatttattaagtacctgctgattggcgcactgggtccgctggtcataacgtctaaagaggatgtatgtcaaacttcatggccatctatatttttctcttattttgcaacatcacatatctatgtcttttttgcttttaatatataccgttctgtttcttccactatcaaacatttttaattctttattacttcttgtactccttccttatattcttattttcattttttattaacattcctattttttgttttatttttttccatctctctttattttatccacttttctctgttttctttttctaatcaaataactaatatattttt

SEQ ID NO: 13488 - DNA, 372 bp, Zea mays
  Clone ID: LIB3158-008-Q1-K1-A9
gcgctacaagctcgcctatgatgggtttctctccaaggtgccgattcctcctggacaagtggatgctataaacgatgcgttgtcacctgaaggagcggcagacgactactaagcgtgcctgaagcagcttgtcaagaacggtgtgatttctatgtcagcggcgactggatttcccaggtttgatctccagcttctgggaatgggacctgatggccacattgcgtctctcttccctggccaccctcttgttaacgagaaagagaggtgggtcacatacattaaggattctccatagccaccttcagagagaattacattcacgtttccagtaatcaactcattcgcatacgttgcgatggtggtgacctgagc

SEQ ID NO: 13489 - DNA, 162 bp, Zea mays
  Clone ID: LIB3158-008-Q1-K1-E4
tttattccacctgctcaaactgtcgtgcttaagcttgtgctgcaccacctgacctatggggagggcgtcaagcacctggcccaatgcctgatggctattccttcactgtatgatggctggatagttattattttttgacattatgattgaccactctgggcc

SEQ ID NO: 13490 - DNA, 318 bp, Zea mays
  unsure (1)..(318): unsure at all n locations; Clone ID: LIB3158-008-Q1-K1-H4
cgtctcggggaggggttttcaatgagggtcannactcatgcctgtgtatgatattctcttcaaaanntctctcatgtgaacagagcgaaannattagataccctcatatcttctnnggtgattcttttagtagggctgtgtcgatgtcttttgcttaactgacatctgacatttgcctcatatcccaatacttctgttattatgtgtcagaacttgaatgaaatncgacatatgtcacacctaatatttattttgtgcgcgaagatgatgcaaactacccgcaatcatgcaatcgttcntgccgacgagcatngggca

SEQ ID NO: 13491 - DNA, 328 bp, Zea mays
  Clone ID: LIB3158-008-Q1-K1-H5
ctagttctagatcgcgatctagcggacgcgtgggaaggaattatcatcagattcatcggagcatgttcgttcagctttggcatcggttattatgggaatggctcctgtattgggaaaggacgccactcttgaacaactgcttcccatttttctttctttgctgaaggatgagttccctgatgtcgactcaacattataagcaaacttgatcaagttaaccaggttattggaattgacttgttgtcgcaatcacttctgccagccattgtagagctctcttaagataggcactggatagtttcgcttgccataattgagtacatacctt

SEQ ID NO: 13492 - DNA, 360 bp, Zea mays
  Clone ID: LIB3158-010-Q1-K1-A2
acccgcggttccaaatccatggagacccagaagcagctgacatagtttttacttcaggagcagatatcgttgtggttggcattaacataacaacacaagtctgcctgacagatgaggatctcttggagctaagaaactcgaaagggaagcatgcagcgttcttatatgagatgtgcaagttctacagagattggcatgccaagtctgatggttttcatggaattttccttcatgatcctgtgagcttcactgccgtacttcatccagagtacttcacattcaagaagggtgtggtgagagtagagacccagggcatttgcactggccacacttttgatgggatcaggatttgaaaaagtg

SEQ ID NO: 13493 - DNA, 336 bp, Zea mays
  Clone ID: LIB3158-010-Q1-K1-B1
gtttggtttcgagacatccagaccgagcagagcagaacaaacgagcccgcgtcggccaaggcgaaggaccgccacgagaactcgccggacagcgccggccgcgcgacgagactctcctcgttcattcccgacgcgcgttccagcccagtagccgtcgtggcgcctgctcgcgcagcggcggcgccttcttccgaaggtgacaggagcacgccgccgtggtcgtcctctgccacctcgcccaacgtgtcgcagccttcgctcagggacatacaacagatgcagcagaagaggcaccatggcggcgtctcccacagcccaaaaacccagacatcgggc

SEQ ID NO: 13494 - DNA, 443 bp, Zea mays
  Clone ID: LIB3158-010-Q1-K1-B10
tcgaaacgcttaaaaaaaaaaaaaaaaaaaaatttaaaaaaaaaaaaaaaaaaaaaaaaaaaaggggaaaaaaatataaaaaaaaaaataaaaaatataataaaatataaaaaaaaattattaattaaaaaaaaataatttattggtttggctttttttggtattataattttatttcttttatttgcaaattaatttttttttttgattttatatttattaatattttttttttttaattttctaaatttttttgtgggaaatctttatttttaaaaaattgttttttttttaaaaaaattcattttttttcccttttgttttttttataatagtttttattttgttgccttttataaaaattcttcttcgttttttttttaaaaattggaactttttttaaaaaatgtttttttttacaaattttttattggtttttttaa

SEQ ID NO: 13495 - DNA, 359 bp, Zea mays
  Clone ID: LIB3158-010-Q1-K1-B2
ttcacttcgccccaggcataggattttatgaatcacacatagatgtgcctgagctgtcattacttgatgctggttccaacattagccacaaaataaacaaactgtcctttgggacagaattccctggcgttgctaatccacttgatggtgctcagtggacacagccagcttcagatgggacataccagtatttcataaaagtcgtccctacaatatacactgatattagaggacgcggtattcattcaaaccacttctcggtcaccgaacattctagagatgagaaatgttcgtacgaaatcccaacctgcagtattattcttctatgatttctcacctataaaggtgatattcacaga

SEQ ID NO: 13496 - DNA, 359 bp, Zea mays
  unsure (1)..(359): unsure at all n locations; Clone ID: LIB3158-010-Q1-K1-B3
cgaaccgcctctctcttggcgtcggcaacccagcagcgcagcccaggtagcccagtacttccttggctccagcgcgcgccgctctaaaaccggcnnagaagtaagaacccggggagggannagcacgcnncccaaacnngttccgaggggtttcgcctttctttcggagcgccaaccaannngccacccnnggagcgactttcgccacnncggcgccggaagaaggggaagggcggaagggcttaggcngaaatggcggaccgaagannatgaggctntngggaagaaaagaaaggaagaaaggaattnntagcacagggcccnttctgtcagtaccttaatggatgagtgggttaaga

SEQ ID NO: 13497 - DNA, 453 bp, Zea mays
  unsure (1)..(453): unsure at all n locations; Clone ID: LIB3158-010-Q1-K1-B4
cttccgtgtttttccccaatattcagggtctgtagataagagacatgaaatgtcccaagtttcttttgaggcatggtgaacctacttaatatctgagagatatactgngggaaaatggaggctgcggcaattccttgtgcaagttgggccgtggaatacagcatatgcaagtgtttgattgtgcagcattctttattacttggtcgcaatatagatgggctgagccgaacagcaaggtattttgattctgcactgctcccgtgtacaaacttggttctcaataaggcaggcaggaatgcatctgccagtggaacagagcaacctgcacattatttatgtatgcctgttcattggagggcttgttcattacatgttcgtctatactagaaaaaaacagaatattagcattaatctatagttaattaaagtatgtaaatgcccctgttttttgtt

SEQ ID NO: 13498 - DNA, 262 bp, Zea mays
  unsure (1)..(262): unsure at all n locations; Clone ID: LIB3158-010-Q1-K1-B5
cttccatgaaatggcaggaggaactcaccttatcccttgtagcagatggtgtctcacgagacanaatcttaacgaactactgaaagcgatctccggtctctgatgtattttatgaccagttaggcctcaacgtgtaaactttattgcttaggcctggctgtgatgttccaagtgatatatgaataaactactgaacttgagacgaggatgtaatgttcagtgatatattatatgaataaactactgaatttgaggcgaggac

SEQ ID NO: 13499 - DNA, 458 bp, Zea mays
  Clone ID: LIB3158-010-Q1-K1-B6
tcggacacacacacaccacacacacacacacacacacacacacacacacacacacacagacaagtggttgccaaagccaagtgtgtgtactagcaaccagctaactcgggcggcaacagggagccatcaatgtcgaagagaaacaccaccaatttcttcaaccaaccacaagaaggacgaggagcaacccgccggcgagtacgggtactccgagaccgaagtgggcaccgccacccggcgagggcgagtacgagaggtacaagaaggaagaaaaagagcacaagcacaagcagcacctcggcgaggccggcgccatcgccgccggcgccttcgcactctacgagaagcacgaggcgaagaaggaccccgagcacgcgcacaggcacaagatcacggaggaggtcgctgccgcggcggccgtccgcgcttgcggctacgtatttcacgagcaccacgag

SEQ ID NO: 13500 - DNA, 359 bp, Zea mays
  Clone ID: LIB3158-010-Q1-K1-C1
gagaaggctaaatcgcatactgcaggcactgaaccgtgctggtggcaaggctggaaacaaaggagctgaagctgctcttactgccattgagatggcctcgctgttccggcatcacttaggctgacaccttgtgtattctgattttctatacacgaggcggcagcatttcctcctatcaagagttttggctaatagagagcttttccgccgcggctagtataatttatttccaagtctgttggtccggtgcggattggttgctttccttctatgagacctgaaaagctcacaagacatatctgtaatgtaaacctgacaccatgaataattgtcgccacgaacgaaatatggtcatgaat

SEQ ID NO: 13501 - DNA, 438 bp, Zea mays
  unsure (1)..(438): unsure at all n locations; Clone ID: LIB3158-010-Q1-K1-C2
gagagagcatagtcgatcatgaagggtggcaagaaggaagtggccggtgcgatggtggccatactgctggttctgcagctcatggcagctccaccgacggccatggccgcccgctcgccgcacggagccgtgccggatggctccctcgccacgacgcccaaggtgacgatgctgtcggccacgctgtgctacacggnggagacatgcaaatacattggctgcctcactcctgcttgctcctgcaactatagtgatcgtctatgctacatcatatttactcctgttgcttgaggccattccgcgaagccacaactcttacaatatgcatgcgccggccgacgacgacgcgcgctgcctctcgtgagcttctgttcaagtgatgcatgtttcaaggcatccatggatgctttacgtatatgcgtataaattagccgtgtc

SEQ ID NO: 13502 - DNA, 174 bp, Zea mays
  unsure (1)..(174): unsure at all n locations; Clone ID: LIB3158-010-Q1-K1-C5
cggtgtttaccacctaccgttgtaaaactttattccccccctttgctactgggttattaagtttggcgttattgttttcttgnnaaaaaaaaaaaaaaaaaaaaaaaaannntntaaaacaaaaaaaaaaaaaaaaaaaaaaaaaaaaaaaaaggccgccccctctaaagaacc

SEQ ID NO: 13503 - DNA, 155 bp, Zea mays
  Clone ID: LIB3158-010-Q1-K1-C6
tcggaggctggtttggctttaaggccttttttaaagcctaagtcaaaccaaccggtttattagggggttaccggtttttaagggcggaagttggttgtcctgaaaaggtttggtaccctgattaaaaaataacctatttgctaagttcattcccc

SEQ ID NO: 13504 - DNA, 363 bp, Zea mays
  unsure (1)..(363): unsure at all n locations; Clone ID: LIB3158-010-Q1-K1-C7
gcgatcgtgctcctgtctctccgatgccccttttgaaacaggggaacactgactgccttgtggtgctgcccccgcttggcttcttaagatgacaagttctttggcttgagctgggcgcacaaagagcccatcttttgaagggacgatgtggacaaactccttcctggctgcatgtttagggcaccgagcttcttgttcctgttgtgtgggttatgaagtgcgcgacaaaatatatgtgtttggtttgttnaaaaaaaaaaaaaaaaaaaaaaaaaaaaaaaananaaaaaaaaaaaaaaatattactataatttaattgcgtaaaaaaataatattatatataataaaaaaaataaaaggggg

SEQ ID NO: 13505 - DNA, 218 bp, Zea mays
  Clone ID: LIB3158-010-Q1-K1-D1
gcggtccgggctgtacaacaactgatgataatgagaggttcgctggaagtcagtctgaaaaaaaaaaaaggggaaaaaatggcggacgatataaaaagaaaacaaacttacgtgcgcatgcatacaacggcacggcttttctataggggcatccaacctcaattccctggccatgggtttacaacgttctgtcttgtagaaccctttatcaacccaac

SEQ ID NO: 13506 - DNA, 253 bp, Zea mays
  Clone ID: LIB3158-010-Q1-K1-D2
cttccgtggccggaagcggtttcggcgcggccccaacctttttttccatggagtgaagttgcccttggtttggacatggtgtttcccttcgcatgtggcctttagttttgaaagacaggtattatgtactagtaatattactcggatcggccagtgctgacatatgcaaaaaaatgttctgtcgttatacattggttccagtattattgtcttcgcaaaactcttgggttttcaagttgctactttttcactg

SEQ ID NO: 13507 - DNA, 459 bp, Zea mays
  Clone ID: LIB3158-010-Q1-K1-D3
gcggtttcaagctcctccagccatgacgttcaagcggaggaatggcggacgcaacaagcacgggcgcggtcacgtcaagtacatccgctgctccaactgtgccaagtgctgccccaaggataaagctatcaagcggttcttggtgaggaacattgttgagcaggctgccgtgagagatgtgcaggaggcctgtgtacatgatggatatgttctacccaaattgtatgcaaaggttcatcactgtgtctcatgcgcaatccatgcgcacattgtccgtgtccgctctcgtgagaacaggaggaaccgtgagcccccgcagcgcttcagacgccgggatgatggcccaaggcctggtcagggcccgccgcgcccaggcggtgcagctcctgcagctgcacctgctgctgctcctcgtacctaagttcttgaaatagtttcggggcttagttttgggaaaca

SEQ ID NO: 13508 - DNA, 425 bp, Zea mays
  unsure (1)..(425): unsure at all n locations; Clone ID: LIB3158-010-Q1-K1-D4
ccagccgtccgcccctgaaccctcagccttctccgtcccgcctcggcactcgacggccgccggcacacaccgcgcagtctcgagacaggaaccggaggaacgaggatggaggatgactcgccgctgacgaagacgatgaagggtgcggtgacaggactcgccgcggggaccatctggggcaccgtcgtcgccacctggtacgacgtgccccgtgtggagcgccacgtcgcgctccctggccttatccggacgctcaagatgtgcggcacctacggngccaccttcgccaccatcggnggcctctacatcggcgtcgagcaagctcgtgcagagccagcgcaagaagcgcgacttcgtcaacggggccgtcggcgcgttcgttgccggagcctctgtctgcggctacagaggaaagagtattcagt

SEQ ID NO: 13509 - DNA, 196 bp, Zea mays
  Clone ID: LIB3158-010-Q1-K1-D5
gaaaaaaaaaaattataaaaaaaaaaaaaatttttaaaaaaaataaaaacttttacatttaggggagcattattttacgtgcgcgtgtcttcaaccttattactttggttgggcgttctctagtctccttcccttctctcttattttttcatcttcatgactttttttgccgtttatttaattcacttttttttta

SEQ ID NO: 13510 - DNA, 158 bp, Zea mays
  unsure (1)..(158): unsure at all n locations; Clone ID: LIB3158-010-Q1-K1-D6
tcgcaggttcttaaatttcaaggaaccccaaaagtttgtcctgggcctttgcctcctgtttaatgctgttttttttgttaagtgatctttggaatgttaggtccatggacatttctactatgaaatntgaaagactatggcattggccttttttggtg

SEQ ID NO: 13511 - DNA, 52 bp, Zea mays
  Clone ID: LIB3158-010-Q1-K1-E1
ccaaactgaacctgcggcgcctcgactggggtagcccgaacccctagctagc

SEQ ID NO: 13512 - DNA, 232 bp, Zea mays
  Clone ID: LIB3158-010-Q1-K1-E2
agccttccggttcctttcaattccacaaaccattacctggggtctgtgctggggcggtacgatgggaatgtgtacccagcgctgtaccaggaggcctggaaaggaccctctgaaacaaaacgtggtgcccgagggtaccacgagtacctcgcccctgcttaacgcagctaagctctcagcttatctgacgtacccctgaatttcatgggtgctttaaaattaccactcatga

SEQ ID NO: 13513 - DNA, 452 bp, Zea mays
  Clone ID: LIB3158-010-Q1-K1-E3
gggggcctccgtggtccgcttccgcgtgtccgcctccgccgcggccaccgcgccgcccaagtgcgggggccccaagaagcggggcaagacggagatccaagagacgctgctcacgccccggttctacaccacggacttcgacgagatggagcgcctcttcaacgccgagatcaacaagcagctcaaccaggcggagttcgacgcgcctgctgcaggagttcaagacggactacaaccagacccacttcgtgcgcaaccccgagttcaaggccgccgccgacaggatggagggcccgctccgccagatcttcgtcgagttcctcgagcgctcctgcaccgccgagttctccggcttcctcctctacaaggagctcggccgcaggctcaagaaaaccaacccggtcgtggcggagatcttctcgctcatgtcaggggacgaggcgcgccatgct

SEQ ID NO: 13514 - DNA, 300 bp, Zea mays
  unsure (1)..(300): unsure at all n locations; Clone ID: LIB3158-010-Q1-K1-E5
cgaccccgtggcccctgacggtcgaagctccttccgtgtcccttgctcctgcctcttcgctggtggtcgctcggccgtgtagctaggcgtctcgtgtcagcttcttcgntttgcttgtatcttctgtcttcttaattcttctccgcctctcctctctttctcctttatcagagatgatgaaaatggatgtacaaaaagatgagcatcgaacgcgcgcgcgcattactactacttgataaacttccgctattgctgctgtgctcaaatctcgtcaatataatataatatggtcatcatctc

SEQ ID NO: 13515 - DNA, 453 bp, Zea mays
  unsure (1)..(453): unsure at all n locations; Clone ID: LIB3158-010-Q1-K1-E6
tcgctttcaagatgcaccgagggttttcctggttcgtgccaaaggccgtttccaaggccccatgggcctccggcaacaagttgatcaaggacttaaaagcgaatgggaaccccgttaaggacaacccaaccgccttttggtccgggggcgggcccgccttcgccttttgcttgacttccgtggtctgggccccaataaacgcctggccgttgttcccaaaaatcctgaacctcgttgggctcggctaccccggctggttcgtgtaccgttaccttcttttaaagaaaagcangaaaagagtttggccgccgacatttgagacctttgaagaaaaaaaatagctgggaacaagaataataaacgcttcatggaaagttttagagcgttctttctttcttggaaagagatctattcgatcggagaaccaatatgncactacttgagtactattaa

SEQ ID NO: 13516 - DNA, 193 bp, Zea mays
  unsure (1)..(193): unsure at all n locations; Clone ID: LIB3158-010-Q1-K1-F1
gggcattgtggcatggtgggacgataggagttagagttgttcataactacaccagatgacgagattgtgttgccccttgtctggtgtagcttgtgtagctntctgcgttgcagtgctgtttgtaaaggcgacttcagagttcagaattaaaacatggttgctttttcaagtgtgctgctaaaggcctgtntgg

SEQ ID NO: 13517 - DNA, 399 bp, Zea mays
  Clone ID: LIB3158-010-Q1-K1-F2
gcgcggcgaccatgaacatgtgctccaagtgccacaaggagatgataacgaagcaggatcaggccaagctggctgcctcctctatcgacagcatcgtgaacggcagcgacgccgtcatggagccggttgttgctggcagcaacacggtagtagctgttgcccaagttgagttgcaaacaatgaacgtgcagcagcccgctgatgttgccggacccagcgagggggtggcggcgatctccaaaggggggaaggtagggccgaaccggtgcagcgcctgcaggaagagggttggacttacgggattcaactgccggtgtgggaacttgtactgcgcactccaccgctactccgacaagcacgactgcaagttcgactaccggactgctgccagggacgcca

SEQ ID NO: 13518 - DNA, 459 bp, Zea mays
  unsure (1)..(459): unsure at all n locations; Clone ID: LIB3158-010-Q1-K1-F6
cttcgccgaccccttggccggccccttggcctgaactgttttccccccttcgaagaacaatttccgggcaagggtgacagcggggcaagggctgcagcaaacgcgctcacagtccaggggtttcatgagccccagcatgggcaagcccattggagatcttgaaatggacaggaagccagtagcaccttgggacgagccaaggacggcggctgatatcagggacttggaagcagggcttgnggtcatgttcgatgagaaagagggcagggtagctcatgcatccncagatctgagcagagaccttccagcagagttcgtggaaggccgatctggtatgcactcgaggcagtcaagctgggttcagagaggagacgcaatcgaagcgtcngcggtgcaaatggctaatgcgcgcaccacggaagctagcaacaaaatgtgcctgagcngtacacattaacc

SEQ ID NO: 13519 - DNA, 358 bp, Zea mays
  Clone ID: LIB3158-010-Q1-K1-F8
gttttcactaatccagatctttttcccgctgggtaagatatctgtgatgatatacggtgggttggcatcgcttatcttctgtggatacatcatctatgacacggacaatgtcatcaagcgctacacctacgatgaatacatatgggctgctgtttcactctacctcgacgtcatcaacctgttcctgtctctgctgcagctgctgagggcagccgatagctgagctcgtcaagctttcacttggatcttgttctcacatacatttgtgtatatcacaaactctgtaatggtcatggatactccaatttataactatactctgtcggtgttaaaaaaaaaaaaaaaaggcggccgccct

SEQ ID NO: 13520 - DNA, 174 bp, Zea mays
  Clone ID: LIB3158-010-Q1-K1-F9
accgtcgtggtcatgagtctgcctctatttggatcccttcgcgcctggatccattttgtgagcttttgggacacctgtaagcttaactttttgaacttgtggatcttctctaaactaaggtttgtttggtttctagaatcaattcatgaggcggtgtatcaaatttactggaat

SEQ ID NO: 13521 - DNA, 330 bp, Zea mays
  unsure (1)..(330): unsure at all n locations; Clone ID: LIB3158-010-Q1-K1-G1
cgttccgaagaaagtttttggtcaagttaggcaaataacctggtctattttgacgccgacaaataggccaccataaggattgtggcgagtgcttaccttgtctgggcttagggggaacccctgtagntttaagtagggttntgtatttgttgattcacccgctgatgaaagggcagtaacttgtaggtttggtgggtgtacccgcctaataagactaggcttgttgctgacaccgtcccttggtacaccgcacttttgctaggagccctctggctggcccagacagtactagcatgtacattagcggcagcttgaacgctgattttgttt

SEQ ID NO: 13522 - DNA, 385 bp, Zea mays
  Clone ID: LIB3158-010-Q1-K1-G2
cggcagtcccatggtatcttaagacgacggcagtcccgtgctaaggctgaacttgagaaaaaggtggtcaaagccagaaagccataccttcacgagtctcgtcatcagcacgcgatgaggagggcaagaggaaacggtggacgcttcctgaacacaaagaaaagtgacagtggtgctcccaatggtaaggctgaacctgagaaagctagtacaattgttgcataatctcttcatactgcacttgatatgagtgcacgcatttctgtttctttataccctgctcccgcatgccctaggaggcgaaaacgccgagcatctccatgtccctcccgacttactacagctacgacagaacgaggcttgaagtagcggtatggctctggca

SEQ ID NO: 13523 - DNA, 435 bp, Zea mays
  unsure (1)..(435): unsure at all n locations; Clone ID: LIB3158-010-Q1-K1-G3
ctaattcgttctcaagtgggcttactggatttggacagcctgcacaaattggatctggccagcagtcagcttttgggaagcctgcacagattggagctggccagcatgcaggatttgggcagactgcccaaattcaatctggttttggccagcctgcccaaattcaatctggttttggccagtcagcacaaatcgggaactgggcaacagtcaggatttgggaagcctgcacaaattggggctgtccagtcaggatttgggcagcctgcacagtttgctgctcaacagacacttggatcagtgctgggttcttttggacaacctccccagttaggaggcataggttctggaggatttggtggattttcaagtgcttctacatctgcttgttntagttctttatcttcangtaattgctgatttgctggtgctgca

SEQ ID NO: 13524 - DNA, 103 bp, Zea mays
  Clone ID: LIB3158-010-Q1-K1-G4
accctccgtaaaaggtcgcccattcagaatgaaaaaaaaaaaaaaaaaaaaaaaaaaataaaaaaaaaaggggggaattttttaaaaaaaaaatataatatag

SEQ ID NO: 13525 - DNA, 392 bp, Zea mays
  unsure (1)..(392): unsure at all n locations; Clone ID: LIB3158-010-Q1-K1-H1
tcggtttggggcggccgccgccgccgccgccgaagccgaaacaatggtaacttcctagccgtcgccctagttctcgttttccatggagttggcctgtgccgcctgggttcaatggttcttctgactgggtggatggctactttcgtggttgggccagccgtggcacaaaaccttccgaatcaaaaaaaaagctggcgaagaagatgcgccagaaccgccccatccctactggatccgcatgcgcactgacaataccatcaggtacaacgccaagcgcaggcactggcgccgcaccaagctcggcttctgagcgtccggattggccggctgctgcgtcngaaggctagggtctaagagctatcttccttctgttttatcaatgtgtcagtttt

SEQ ID NO: 13526 - DNA, 450 bp, Zea mays
  Clone ID: LIB3158-010-Q1-K1-H12
cccacgcgttctaactgtgagcgcgtactgtgcgacgtgggacgccagcaagccgctgtcgtggcgcatgaagtgcggctggacggccttctgcgggcccgccggccccaccggccaggccgcgtgcgggcagtgtcttctggtgaccaacacggcgacgggggcgtccatcacggtgaggatcgtggaccagtgcagcaacggcggcctggacctggactacgacacggcgttcaagcccatcgacaccaacggccagggcttccaggccggccacctcaccgtcaactaccagttcgtcaactgcggcgacaactgaactgatagattattcacctgtgcgtgcacctatatgtactagcaccattatttacaagaattatatggatggtgatcccacacgtaagagccaataaaacatatatgcccagggaaataacttgattacct

SEQ ID NO: 13527 - DNA, 435 bp, Zea mays
  unsure (1)..(435): unsure at all n locations; Clone ID: LIB3158-010-Q1-K1-H3
ggggattcttatggtcggtctcgacgccgccggtaaaaccaccatcctctacaagctcaagctcggcgagatcgtcacaaccatccccaccatcggtttcaatgttgaaactgttgagtacaagaacattagcttcacggtctgggatgtcgggggtcaggacaagatcagacctctctggaggcattacttccagaacacacagggtcttatctttgttgtggatagcaatgaccgtgaccgtgttgttgaagccagagatgagctgcacaggatgctgaacgaggatgagctacgtgatgctgtgctgcttgttttcgccaacaagcaagatcttcctaatgccatgaatgctgctgagatcactgacaagcttggattacactccctgcggcagcgacactggtacatncagagcacttgtgccacaactgg

SEQ ID NO: 13528 - DNA, 250 bp, Zea mays
  unsure (1)..(250): unsure at all n locations; Clone ID: LIB3158-011-Q1-K1-A2
tcgcttgcgagtggggtcttaattaggatgtgatattgcttaatttcccccctgtttctactcattttttggcccttgataatgtccacgagtatgtaatagggactaatgaatcaaacgttgttaaataaacatttcattccgttttgctaaanaaaaaaaaaaaaaaaaaaaaaaaaaataaaaaaataaaaaaaaaaaaagaaaaaaaaaaaaataaaaaaaaaaaaaattttctttttaaacataa

SEQ ID NO: 13529 - DNA, 414 bp, Zea mays
  Clone ID: LIB3158-011-Q1-K1-A5
gtttcacgcgcacggacatgaccaggggctggggaaagcgcaccgccggcaaggcggccgacgtcggggcgcggttcgcgctgttgccgcccaccgagctccccacggggaccttcttcaagtggcgcacgccgcagctatactctaagctgtgactggctagctgagctgtcgtccgtcggccggggcgtacagcatttcggtccggcggtgtaggcgtgtagccgctcctcctattcctcctgctgaatagtactagcaagtatcaacaacgtgtgcagagaagtcggtaaccggagtgtcgatctgccaaggtgctttggttgaacactggctcagcccgtttgtgactctcagctatgtgtacaatgtgcgcttatatctgtcttaagatttaggccaacttctgagcac

SEQ ID NO: 13530 - DNA, 186 bp, Zea mays
  unsure (1)..(186): unsure at all n locations; Clone ID: LIB3158-011-Q1-K1-B2
caatatcacatcctgagttctactgaaataatatccatttccgtggtattatgttttgttactcatttaaaaaaaaaaaaaaaaaaaaaaaaaaaaaaaaaaaaaaaaaaaaaaannnnaaaaaaaaaaaaaaaaaaaaaaaaaaaaaaaaaaaaaaaaaaaaaaaaaaaagggcggccgttttaa

SEQ ID NO: 13531 - DNA, 221 bp, Zea mays
  Clone ID: LIB3158-011-Q1-K1-D11
gatttgcacccttcgagctaatcttcattattacaacttcttagttccctccctttggtggggacttgctacgagtggggccaccgttgcttgttttcttgggaggttttggtgtataatttggactgcctctagattttctcacagagcagcaaaacctgatcagttcatttccgtgctgtgtatgagaagcatagcatactcaataagcttgttgcccc

SEQ ID NO: 13532 - DNA, 115 bp, Zea mays
  Clone ID: LIB3158-011-Q1-K1-D2
atcgaacctaacccccgatctgatcgaatcgaaggttgcggcggcaatgggcggggaccatggcggtgggcacgccggcggggacttccgccagaggtatggagcatgacggcgg

SEQ ID NO: 13533 - DNA, 84 bp, Zea mays
  Clone ID: LIB3158-011-Q1-K1-E5
acgagttgttcttatttttcatccacctcttttttacggaacgtttttttttatataagaaaataaagtcaacagagcagttct

SEQ ID NO: 13534 - DNA, 98 bp, Zea mays
  Clone ID: LIB3158-011-Q1-K1-E6
ctcgtgtagtagtattttttaggtggtagctttcagtactggtttgaacctgttgttggctttattttctgagtaaaatgcaccactcgaactttact

SEQ ID NO: 13535 - DNA, 313 bp, Zea mays
  unsure (1)..(313): unsure at all n locations; Clone ID: LIB3158-011-Q1-K1-E9
cgcgaggtggcgacggcgacggagacggccgccgactgccgcgaccgcgcctccaccacctccgggtgaactcgacgtgatgggcattggaatggttgttacagtagttgttcttggatgatttttgagtggattttattgcgtgtactatatgctcgatgcaattaacagcatgcgtgtggatcgtcgttcgtatatacgtacggtgcttgtaactgatgattgtggaccgtggacgtgtatataaataaagtgagtggttcttcaannaaaaaaaannnnaaaaaaattaataaaaataataaaaataaaa

SEQ ID NO: 13536 - DNA, 387 bp, Zea mays
  unsure (1)..(387): unsure at all n locations; Clone ID: LIB3158-011-Q1-K1-F5
aaaagtctgtttcgatggaaactgatccaaaggttgacccgccaaaaaagaaagttaagaaaactactgttccggtccatgagttggtctatggggccttggctgcagctgacctgcaaaaggctgtagagaaagagtatgaaaatggctcttcaagacagagtaatggaagaaacanaggagaagaagaatgctgttgaagcttatgtgtatgacatgcgtaacaagctatatgacaagtacagtgatnttgtcacacctgaagacaaagaaagtttgatcggtaaacttcangaggttgaagactggctctatgaagatggcgaggatgagaccaagggagtttatattgctaaactagaagaactaaaaaggttggtgatccta

SEQ ID NO: 13537 - DNA, 384 bp, Zea mays
  unsure (1)..(384): unsure at all n locations; Clone ID: LIB3158-011-Q1-K1-F6
acccttccggaagcggccgcccactcaaactacggcctgttaactttcttgccaaccgatgtggtagttgggctccaaatttgcaaggacaagaacgctcagcctcaactgtgggaatacgtagctccgttgaaaggcggattaatcgtcaaccttggcgacatgctcgaaaggtggagtaaccggcgttttcaggtcaaccttacatcgagtggtcttagatgggcgagaacgcttactcgatagcctacttcgtggaaccaagccacgactgcgtggtggagtgcctgccgacctgcaagtccgaataaaatncttcaaagttcccttcgatcaccttgctcgcgtacctgtcccagcgctacaaggacactcacgcggatc

SEQ ID NO: 13538 - DNA, 284 bp, Zea mays
  Clone ID: LIB3158-011-Q1-K1-G11
ggctgatcgatttgtgtggagggcatggggaatactcttttttttttctttggttgcatcattgcccatgatgttggcttttcgacaagctgtggggctattttttcgccctcccctcgggttgtcaactttgtcaagccaattttgaggtgaatgcttgaactgaaaactgtaattccttgtataaattaaagtagctagctaggttctgtatcttatgggatctgatatgtagaaatgatgaaaggaaaaggtcaaaaaaaaatgcatgagatgaagcgaac

SEQ ID NO: 13539 - DNA, 133 bp, Zea mays
  Clone ID: LIB3158-011-Q1-K1-H2
tctagatcgcgagcggacttcttgtttttcttatcctcagatttgtattccttctttcttactattacattcagtttatgcgtattgctttccaacaatattggcacgtggttaatgtatacattttagtttc

SEQ ID NO: 13540 - DNA, 179 bp, Zea mays
  Clone ID: LIB3158-011-Q1-K1-H5
ggctggcaacgatgaggcccagttcttggccactgaggggatttttaaggtcgccgaaggggccactgctttgttcatggagcagctccgaggaatccactacatcaccgaccgaggttcacagcagctcggctgctgacattgagtaccctaacaatgtccctctctgcgctctcgat

SEQ ID NO: 13541 - DNA, 116 bp, Zea mays
  Clone ID: LIB3158-012-Q1-K1-A12
ggaagcctaaaataactaggctgcatccatttcttatcagccacccaagcaccacctatgggtggggggacttctccccctgccctttattcaaacgccctgaggtgccacggaca

SEQ ID NO: 13542 - DNA, 248 bp, Zea mays
  Clone ID: LIB3158-012-Q1-K1-A2
agagagttcatcctcggcttcgccgccaagaaggcctgaacgaccatgtgcaggtcgatcgtgcccggttcttccggacatttggctgcatgtaactaaattcttcgttttctggaattggtggagtgttcaacctggggtgaacaagctgtttgcagaagtagctttccgtagtcagctgtattcttactgaagtctgaaggtgtactgcgacctgccaaattgctcaataaggtcatgcttcgttt

SEQ ID NO: 13543 - DNA, 292 bp, Zea mays
  Clone ID: LIB3158-012-Q1-K1-A5
acgcccaaccgccgagctcagcttagctccactccagctccaatcgcagtcgtgaccagagcgcgagagctagctagagggccgtgaaaatgccgatcaataggatcgccctggggagccaccaggaggtgtaccacccgggcgccctcaaggcggcgttcgctgagttcatctccaccctcatcttcgtcttcgccggccagggctccggcatggccttcagcaagctgaccggcggcggcccgacgaccccggcgggcctgatcgcggcggcggtggcgcacgcgttcgc

SEQ ID NO: 13544 - DNA, 299 bp, Zea mays
  unsure (1)..(299): unsure at all n locations; Clone ID: LIB3158-012-Q1-K1-B4
tgactggctgctctgctccatagaagatgaatgaagagagagatggtgaagaaagctttggcaaatggcaattgccgcagcaagccatgtctgcgccactgaccggcttactgattggtataatttggtgtggcagcaaccacgattaatgcgctggtcttttatctttactactagtttggactcgtacggaatcttatttttctttacccttttcgagtctgaactgaaactgctgagagatttgcagntttgatctatcatatcctgtggtaaaaaaaaaaaaaaagggcggccgc

SEQ ID NO: 13545 - DNA, 321 bp, Zea mays
  unsure (1)..(321): unsure at all n locations; Clone ID: LIB3158-012-Q1-K1-B7
cacgcaggggtccggccacgacgggccctacaagtacgacattaagcggtccgggaacaacgtcaacgtgtccacgggggtgaactggatgctgctgggcagccccgtcagcaaggacttcccgctcgccatctaccccgtcgacaaggtgccgcttccctaccagctgttcgggcccaagccgcccacgccggcgcccgcgccggcacccgcgcccgggccggccaaggccaagaccaagaagaagaagaagtccgccgccatcgccgagccgcccacggccgacgacgacgacaccggctccacctncgacgaccagaa

SEQ ID NO: 13546 - DNA, 309 bp, Zea mays
  Clone ID: LIB3158-012-Q1-K1-C1
gcggccatcagctgcgggcaggtggcgtcggccatcgcgccctgcatctcctacgcgcgcggccagggctcagggccctccgccggctgctgcagcggcgtcaggagcctcaacaacgccgcccgcaccaccgccgaccgccgcgccgcctgcaactgcctcaagaacgccgccgccggcgtcagcggcctcaacgccggtaacgccgccagcatcccctccaagtgcggcgtcagcatcccctacaccatcagcacctccaccgactgctccagggtgaactgaaccctaaacgacgacgacggcgcc

SEQ ID NO: 13547 - DNA, 263 bp, Zea mays
  Clone ID: LIB3158-012-Q1-K1-C4
ggtagacagatccgagtcacggttgcagaatcaaagcccaggcgtgaattttgagattttgttaaggtggtttagaggtcaatagcgtgtgttcacaagttctagtttgtagcgtctattctttcttccgtatgagtaacaagaagatgctgataatgagagactggaagtgaaactgctgtccacaggaagatatttttcccaacccttctgtataaaaaaaatacaccatcaacaaaaacaaaataaataaaaaaaataaa

SEQ ID NO: 13548 - DNA, 341 bp, Zea mays
  Clone ID: LIB3158-012-Q1-K1-C5
gaaaaaagggccgacccacgcgtcccgcgggcattagctgcggtgaggtggcgtcggccataacgccctgcattttctacgcgcgcggccagggctcaagggccgacgggccctgctacaacgtggacaggatcctcaacaacacacgccgcaccaccgccgaccgtcgcgccgcctgcaactgcctcaagaactccgtcgccggcgtcagcggcctcaacgccggtaacgccggcatcatctactccaagtgcggcgttagcatacactacaccattagcatcttctccgactgctacacggtgaacttgacccttaacgactactactgctcccgccgg

SEQ ID NO: 13549 - DNA, 228 bp, Zea mays
  Clone ID: LIB3158-012-Q1-K1-C8
gtctctaacctgtcgtactgacttctgtcgatagaagagaatggggccagatgctgcttaggtgtgatctatcctatccatccatggataataaagaagtttgtggattgctgttttattaacttgatggaactcctccgtaggtgtggtttgtgcaacttggattttgaaggcttgtgcgtctgtgagtgtttgatcaaatcgaaggtggtgtttgtttgctgaatg

SEQ ID NO: 13550 - DNA, 275 bp, Zea mays
  Clone ID: LIB3158-012-Q1-K1-D2
cggacgcgtgggccgcggtcccgcaccacgggcacgcgccgtcgcctcgcccccacggcctacgccgccgccgcggcagctgcggctgaggccccgctccccatgacgccccgtccgaccattcattcgttcaccggccagcgtcagccagccaggcgtctaactccaacacgtgttgccaaatgccaacactccagtctccaggtgatggtcggtcagccaccagggcctccccgttcggccgccgtgcgtccaacagtcgggcaccggcgggc

SEQ ID NO: 13551 - DNA, 64 bp, Zea mays
  Clone ID: LIB3158-012-Q1-K1-D9
ataaaaaaaaaataaaaaaaaaaaaaaaataaaaaataaaaaaaaaaaaaaaaaaaaaaaagga

SEQ ID NO: 13552 - DNA, 126 bp, Zea mays
  unsure (1)..(126): unsure at all n locations; Clone ID: LIB3158-012-Q1-K1-E3
acgcganggacggccaaaggagangcagggggcaacaaaggagacaagngcgggggcnaaggaggcgagacaacagaacgataagcaagggcacaaaggcaaccacaagaagcggcgaataaagcc

SEQ ID NO: 13553 - DNA, 117 bp, Zea mays
  Clone ID: LIB3158-012-Q1-K1-E9
tggaaaaaccttgccaacaaccgaactaaactgaatggcgaaagatacgcgctctgtagcggggcattaaacgcaaaaggtgtggaggttacgctcattcagaccgttacacttgcc

SEQ ID NO: 13554 - DNA, 109 bp, Zea mays
  Clone ID: LIB3158-012-Q1-K1-F11
ctcaattccaatgcttagcattctgatgatgtctgaattccttgtaaacagacacaagactgtcctttgctgtaactcatgtgcagttagtggaattcactttcgccct

SEQ ID NO: 13555 - DNA, 380 bp, Zea mays
  Clone ID: LIB3158-012-Q1-K1-F2
acgggcagctcaacgaccaaaacagagttggctggaaactggttaacaaaaataacaagaaggatgtccattaattggggatgacccaagggaggacttcgtgaactgcgtgcggtgcatcaggattctttcgccgcaggaagagaggcaaatgaggctggccagcgactacggagacagctttcttggcaaccaagcgtgtagcagctcggacgggggtcgtccgtggagggtcaccggcgactagaaatagcacgctatgcctgagcacaaatgtttgatataatccgtcccacgatagcaagaaaatgatacgcgatttctgagcacaaacttttgcactcaaatgatcgtgcaaacagttagcattttaagaaaaa

SEQ ID NO: 13556 - DNA, 64 bp, Zea mays
  Clone ID: LIB3158-012-Q1-K1-F3
aaaaaaaaaaaaaaaaaaaaaaaaaaaaaaaaaaaaaaaaaaaaaaaaaaaaaaaaaaaaaaga

SEQ ID NO: 13557 - DNA, 325 bp, Zea mays
  Clone ID: LIB3158-012-Q1-K1-F8
gtcttgctgcgcaagaagaagggaaacgagaggagggcggcgatggcgaagaggctgctcccgtcgctgaaccgggtgctggtggagaagctggtgcagcccaagaagaccgccggcggcatcctcctcccggaaacatccaagcagctgaatgctgctaaagtggtggctgttggccctggtgagcgcgacaaggcaggcaatctgatcccagttgctctgaaagaaggcgacactgttcttctgcccgagtatggtggatctgaagtcaagcttgcggctgataaagagtacctcctcttcaaagaagatgacattttgggca

SEQ ID NO: 13558 - DNA, 407 bp, Zea mays
  Clone ID: LIB3158-012-Q1-K1-G4
acgggcgaccctccctacttcgctccttccgcgccgcctcccggccggcgccgccatggtgaagtactcgcaggagccgggcaaccctaccaagtcggctaaggccatgggcagggatctgagggtccacttcaagaacacaagggagacagcctttgcgcttcgcaagttgtctttgaccaaggctaagcgataccttgaggatgttattgctcacaagcaggcaattcccttccggagatactgtgggggtgttggtcgcaccgcgcaagctaagtcgcgccactccaatgggcagggccgctggcccgttaaatcagccgggttcatcctggatttgctgaagaatgctgagagtaacgctgatgtgaaaagcttggatgtggacaacctctatatttcacaca

SEQ ID NO: 13559 - DNA, 328 bp, Zea mays
  Clone ID: LIB3158-012-Q1-K1-G9
gacgtcgtcaaggccatcgagaaggtgggcacccgcaacggctccacctccaaggtggtcaaggtcgctgactgcggacagctctcctagatctctctgatctggtctgttcggccgccctccctccgtcatcgtcgactccccctgcgtccgttcctttggatctgaataagatggtggtgatctgagtggtggtcttagtttatcatgtatcgctcgcagtttaatttagcggtttaggtgtggatctgtgaaccccatggcgcctctgcttgattcgtgtttcacctgttatgttctgagattcatgataatgctatgagaactg

SEQ ID NO: 13560 - DNA, 197 bp, Zea mays
  Clone ID: LIB3158-012-Q1-K1-H8
aaaaaaaaaaaaaaaaaaaaaaaaaaaaattaaaaaaaaaaaaaaaaaaaaaaaaaaaagggaaaaaaggacggacgttctataagattgaaatttgtttacgggggggggcaatcatggtggctccctttttgtgtccccgtccttgaatcgccttgccgtccctttacaaccccttaaatggcaaaactttgccg

SEQ ID NO: 13561 - DNA, 291 bp, Zea mays
  Clone ID: LIB3158-014-Q1-K1-A10
gaaggacctccaattttttgttggtgagtccatgaaggatgatgcgtctgtggtattcgcctattacaaggatggtgccactaatccgacattcctctatttctctcatggtcttaaggagatcaagtgctaggcgtgcggcgaaattagttacccatgttgggtactatctatgtactattattatatccaaaactatagttgtcctggctgaattgaactcaaaagggtttgtttgagaaaaaattgtcccaagattggattgcttgttaaagctcaatattgttattg

SEQ ID NO: 13562 - DNA, 132 bp, Zea mays
  Clone ID: LIB3158-014-Q1-K1-B2
ctcttggcagctggacttaatgttttgctattcttgtcgacatcacgagttgaattgtcaaaaaaaaaaaaaaaaaaaaaaaaaaaaaaaaaaaaaaagggcggccgatataaaagaaaccaagcaaacaaa

SEQ ID NO: 13563 - DNA, 364 bp, Zea mays
  Clone ID: LIB3158-014-Q1-K1-B3
cttccgggattttggccagggctattccttcaccaaggtttggcaaggccacgaaagcttcgtccctgggatggccctttcctttttgacacacttcccgaaaaaaaaaaggcgctggaggggaaacgcccttcacgagcactctttcttagtggatcccttagattagacacgtttgtggacgccctgcctctatatatattggagctgttcggcgctggaccgccgagcaaatatcaatcgcctcttgataccacaccaccgtcttttgcaggggttgtggcagcagctcatgcagggaatgatgacaacatgttgttattattattgaaaaatgtctgcagtggccgataatcatgtaaaa

SEQ ID NO: 13564 - DNA, 68 bp, Zea mays
  Clone ID: LIB3158-014-Q1-K1-C7
tgactttaacaataaaaaaataaaaaaaataaattataaaaaaaaataaacacaaacaacactaaaaa

SEQ ID NO: 13565 - DNA, 327 bp, Zea mays
  Clone ID: LIB3158-014-Q1-K1-D7
gacgcgacgcctgggttgattttttttttgaaaccgaacaacctaacgcagctgcttctgtcgcatcgtgaattggtgaacatcatactaataccttttatttgctcttcaagactgttcctttttttttactggcaccctacaggaacgagagtattgctcttatctgacacggagagaaataggccaccgtcactaacgccaggtatgtctgcgttgttaattttgtagatataaacctcttccaacttctggtggctgccaagaaaccactggcaactttcagaccctcttgtggcgggaataaaaccaaagccgcgtacacag

SEQ ID NO: 13566 - DNA, 251 bp, Zea mays
  Clone ID: LIB3158-014-Q1-K1-E12
atggtctgcacggatgacctgcgtcctgtggtgcgtgtaattttgatgtgcatgtttgccgtgcagcacagacgacgatttcacgtctgcatggccaacccgttctgtatatgaaaagaaacaggtggctaggttttcttggttttccttattttagggctaacaaaaaaaaaaaaaaaaaaaaaaaaaaaaaataaaaaaaaaaaaaaaaaacaaaaaaaataaaaaaaaactaaaataataaaaaatat

SEQ ID NO: 13567 - DNA, 238 bp, Zea mays
  Clone ID: LIB3158-014-Q1-K1-F10
gattagttcagtacaactgtctgtggacattgtgcctgtttagcggttgaacttggattcggttgttcgaagtttctaatccgaacgatggatttcattttcttcttcttttcttagcattatgtcactgacccacgtcgtcctgtctcaatacattctaaggttcatgtgatgttatccccatttgtccacgctgaagtgaagtgaatgcagtcactatttcgattaaaaaataaaa

SEQ ID NO: 13568 - DNA, 430 bp, Zea mays
  Clone ID: LIB3158-014-Q1-K1-F3
acgaggcaaggcactgcacgcttgcatgcacacagtccacactcagacatggcgatgggcgccgcttgcatcctactgatgatggtttcgctggaggccctgcttctcgccgccgtcgccggcggcgggaccatccgtctgcccagcgatgtcggaggcgttgctgcagaccttgtcacggcgatggcgagggcgagggcaacggcaaagcatcagttacgcgacgaggaggagaggccgtgggggaaatgctgccacttggccgtatgcgtcaagacgtacccgctaacttgctcgtgcttcgatcgggttgagcgctgctccgactcctgtaaggagtgtgtggaaacggaggactcgcgccacgtctgcgtcgacaggtaccgaggagaccccgggcccatgtgccacaacgaggacgggaggagcg

SEQ ID NO: 13569 - DNA, 205 bp, Zea mays
  Clone ID: LIB3158-014-Q1-K1-F8
gcggagagcatagtcaatcatgacgggtggcatgaaggaagtggccggtgcgggggtggccgtactgcttgttctgcagctcatggcagctccaccgacggccatggccgcccgctcgccgcacggagccgtgcccgatagcttcctcgccactactcccaatgtgactatgctgtcggccacgctgtgcttctcgggggagaca

SEQ ID NO: 13570 - DNA, 310 bp, Zea mays
  Clone ID: LIB3158-014-Q1-K1-F9
atagagctcatcttgtcggagaaggaagatccagtgaagaaagaggctgagtctcagatcgcaacctggaaggcttagagaaggggctctatcttctgtgattggcttagtacaagttttggctgattgtttgttgactcatactgattacctgagtattggttgcaagtgctttatcactgtccgaactgtgcatgcaattcactggtctagagaattgttcgtggattgttttcaaaataaaaaaaattatatttaacctacctaaattaaattatcacgtctctaaatatttaatataaatatgtat

SEQ ID NO: 13571 - DNA, 276 bp, Zea mays
  Clone ID: LIB3158-014-Q1-K1-G10
gcggcaagagcgtccctcagggcttcctgtgcgcctaatatatactagtggctagttcgtcactagcttcagttgccatgcatatttgtgattcttcttctttccttctagttcaccactgtatgtacgtgcctcctccgatccggatgttttctttgtattgccttcccttctactcttcaaaaaaaaaaaaaaaataataaattaaaattaaaaacaaactaataaataataaaattaaaattaaaaactttaaaaattattaaaaaaaattta

SEQ ID NO: 13572 - DNA, 346 bp, Zea mays
  Clone ID: LIB3158-014-Q1-K1-G11
acggccgaggtaacacacaagctgcacacccgtgcgaactatgtcacagtcgggagcgcccatgcccttcgatccttcaacattgctaaagatgagcttcagcacctccggggaggtcgttcttctctgtcaggatgagtggaggccgaagaaactttttactctttcaacagattatgatctgagcgtggcccgctcgacttcaataatcctgatggacatattcatcaagcctatgcctgggtcaattcaccctctctagaacagtacatgcataccgtgtaccaagaacacaagcttgggagctgtacctccaacaacccaacatcttaaccttctttatttt

SEQ ID NO: 13573 - DNA, 243 bp, Zea mays
  Clone ID: LIB3158-014-Q1-K1-G3
tgtgaattaatcagtgttagtttgagtgaacaaacctatttcttgtaccagtgcagttagttgaattagttgcacagtttttgtaataccaaataatcagctgttttattttatttgagaaagtcgtggttctgttaaaaaaaaaaaaaagaagaggaccaaaaggactaaaaataatatggaaaaacgaaagaggtaatgaaaaaataatggaaagagaaaaaatctgggcgccttttttta

SEQ ID NO: 13574 - DNA, 262 bp, Zea mays
  Clone ID: LIB3158-014-Q1-K1-G8
gcggttaaagttcatcgccgtcgcattgcattgtacgccctaatgatcaaatgctcgggtgagtgatcgcagtactgcttataagaacactcgcttcttccattgttggatcatgtaacgagatatgaaatttcgctgcagggaaaccaatcagcctggttctgcaaaatctgttgggaacgatatgacactgcctactgttttctggtgcctatttacatgtggataaagaaccacattgtgccaaaaagcatgcctatct

SEQ ID NO: 13575 - DNA, 342 bp, Zea mays
  Clone ID: LIB3158-014-Q1-K1-H11
cggacgcgtgggcggacgcgtgggctgcatgccaggtccggtttcatcgcatgtcgccggccgctggtgcttccgtgtcatgggagggagcttcgtttatctttctgaccgacatgtaatgtgctgtgcgaggagccgaggactgctgctacaacgcttcgcgatgcaaggacgttgttccagcaggacgattctgtttggactccggaactgcggtttggagttctgaaggcgaatatgcgataataatgcggtgtaaattgcgatgaaacctgagattctttgtatgaaatacagaatgtatcgcttggacactgttttttagaaactattttaatttat

SEQ ID NO: 13576 - DNA, 352 bp, Zea mays
  Clone ID: LIB3158-014-Q1-K1-H9
acgattgaaggtagctgatgttggcactaacattcagcacagggttggagctcggtgctttgcgcgggcagtcacaaataaaccagattttgtgcatatgaacataaatggaaattttatctccgatgaaagggttgatgaggtgaaagaaattctgaaagctggtcagaaatctctggatgtgctgtgcccactagactagaatgaacctgatggagagcctgatgatgaggatgccgaggaccatgaagacaagctggatttgaatctgataagtgtgaaggttgagcaagatgaggatgattgactatccttatgttaaatatactttgctactcaataatcatttgga

SEQ ID NO: 13577 - DNA, 375 bp, Zea mays
  unsure (1)..(375): unsure at all n locations; Clone ID: LIB3158-015-Q1-K1-A2
acgcgtacgcgtgcgcgtgaggccaaagattgctagcaaagagggcggtgacctcaacatattgaacgcggatggcgaggaatctaaatcaaagaaataggacgccagaaactgaaaacgagtgtgtgaaacgtgatgcgtggcaaactgtgcatgccatgtattctgctgaagaaaattcggttccgtatggctgggtagatgaacatgtttagcgcaaagtgacggtgtaactgcaaccggggtaatggcttgcaagttttgttctgtgccatctctatttctccaattattatattgatgaagtttgaaaaaaaaaaaaaaaaanaaaataaataaaataaacccnttttntataatttaattaaaaataaa

SEQ ID NO: 13578 - DNA, 366 bp, Zea mays
  Clone ID: LIB3158-015-Q1-K1-A3
gctgcatccgatgcgctgcgcccgggtccctcgcgcggtgcggaatttaacatggccgtgccggaggtggtggtcgacggcgtcgtcttcccgccggtggcccgcccgccgggctccgccggctcgcacttcctcggcggcgcatgcgtgcgaggcctcgagatcggaggcaacttcatcaagttcacggccatcggcgtgtacctggaggacgcggccgtgcccgcgctggccaagaagtggggcggcaagacggccgacgagctcgcctccgacgccgtcttcttccgcgacgtcgtcacgggcgacttcgagaagttcacgagggtgacgatgatcctcccgctgacgggcgagcagtacgcg

SEQ ID NO: 13579 - DNA, 230 bp, Zea mays
  Clone ID: LIB3158-015-Q1-K1-E6
tcggggatgcctacgacccataccgggagcgcttgatccaagtgcccaaaatgccgcctgatgaatgcttcaagtgctccgacaaggaatcgcttgcggtgggcactgagcttcttgtgttcgggatggcgcgtattgtctttcgatacaacattctgaccaactcatggagcaaggcttatccgattaactattcgcggtgcttgttcgggtcaaccagtgtcggtggg

SEQ ID NO: 13580 - DNA, 131 bp, Zea mays
  Clone ID: LIB3158-015-Q1-K1-G6
tcgcaatcgcagaccaagaaagcattgcccttttgggggagtttgcaaaggatcctgagcccatagtctcgcaaagctgtgaaataactctcaatatgctcgagtatgagaagatcggggaaatcctttga

SEQ ID NO: 13581 - DNA, 200 bp, Zea mays
  Clone ID: LIB3158-015-Q1-K1-H10
gggttaccatgccgaggtcatgttgcacaatagaaagtctgcattgtgcccattggaataaatacagtttctcctaaaaaaaaaaaaaaaaaaaaaaaaaaaaaaaaaaaaaaaaaaaaaaaaaaaaaaaaaaaaaaaaaaaaaaaaaaaaaaaaaaaaaaaaaaaaaaaaaaaaaaaaaaaaaaaaaatggggcggccg

SEQ ID NO: 13582 - DNA, 129 bp, Zea mays
  Clone ID: LIB3158-016-Q1-K1-A12
acgcactgattctataacaccacaaaagccattttcatttaattacttcatacacccaataacgttaatacttctcacctatcccttatctataaacccacccaccaatttttataattatattatttc

SEQ ID NO: 13583 - DNA, 376 bp, Zea mays
  Clone ID: LIB3158-016-Q1-K1-B1
gacgaaccatctacatctcgaggaccttgacgatttgatctccctattatagaaaaccgggttcgcaggacgcatgaactgtgtgtgggggaataatcgcaggttagcactgctgctacgtgtgcccgcctctcttggaatggaagcagcagagccagctatcagactggcagtgaccaccacctcctcagctacctggttgcatgccacagatctgaaattctgaaatgctgtgactgcgactgtgaggtatgaaaaaacagtgtaaataacgcggttgcctccgtacatgtgtgacattttatacacgtgcaagatagcatcggtgtcaaaataggtaagttaggagagttaacatcaaaccaccaggcatagc

SEQ ID NO: 13584 - DNA, 174 bp, Zea mays
  Clone ID: LIB3158-016-Q1-K1-B2
ggaaggtgatgatggtgatgagtactagaagtatcctgatgcggtcatcgtcaggcttgtgtgctgctcttgtccccgttgtggtttgcaacacctgatgttgtaagactttctggttatgtccgccccgctgtgccactgggttattaagaacgtcgttatggatggttgtct

SEQ ID NO: 13585 - DNA, 213 bp, Zea mays
  Clone ID: LIB3158-016-Q1-K1-F7
ctgtgactgtgaggccaggcagacccgtgcacaagctatagtgttctgtagactcaggacctgagcctagcgtcagagcaatgtcaccgttagactgtgtggtgcggtgcttatgcccgattaaattggtgggcattgtggtaacataacctgttgataatgttttgacaatgttttgatccaaaataaaaaaaaaaataaaataaaaataaa

SEQ ID NO: 13586 - DNA, 326 bp, Zea mays
  Clone ID: LIB3158-016-Q1-K1-G2
cttactactgagggtaagtccgttgagatgcaccatgaggctctccaggaggcccttcccggggacaatgttggcttcaacgtgaagaatgttgctgtgaaggatctgaagcgtgggtatgtggcctccaactccaaggatgaccctgccaaggaggctgctagcttcacctcccagggcatcatcatgaaccaccctggccagattggcaatggctatgccccagttctggactgtcacacctcacacattgctgtcaagtttgctgagctcgttaccaagattgataggcgatccggcaaggagctggataaagagcccaaatt

SEQ ID NO: 13587 - DNA, 243 bp, Zea mays
  Clone ID: LIB3158-016-Q1-K1-G6
gtgcaggactacacatctggagacgaaaatgtgtccctcgacgacgaacattccggtgacaatgatgactttgatcggaaagaaggggttgtataggctcagacgcggcggtgtgattgcttctgctgcatgagggaccctgctctagaggctgccatctgcaccgtcgatggaagcataattaacctgcctgtcctgattggttatgggtatacatgaaaactggagtgtcgcgcctaacac

SEQ ID NO: 13588 - DNA, 163 bp, Zea mays
  Clone ID: LIB3158-016-Q1-K1-H1
agccatggcaatgtctgcagactcatggatcgagggatggatgctgatatcttcgaatcatgacggcttcattagtttctacaggctaggcatagtatcccagacagacgggctccgtactaattatgggctgcttggacgactctacgatgatctgaagaat

SEQ ID NO: 13589 - DNA, 60 bp, Zea mays
  Clone ID: LIB3158-016-Q1-K1-H7
ggacgctccctgttgcggcgcattatgcgcggtaggcgtggcggtttcgtcgcaatgtga

SEQ ID NO: 13590 - DNA, 56 bp, Zea mays
  Clone ID: LIB3158-017-Q1-K1-A11
ccgatcggtgattaatcgaaaagtatattgtaatgtataaacgccattttcctttc

SEQ ID NO: 13591 - DNA, 182 bp, Zea mays
  Clone ID: LIB3158-017-Q1-K1-A3
cacggctgatgaagatgctgctgcgaaacagacgaagcacaaggctgatgctgagactggtggcaagagggtgaagagcagtgctgcagtggaagaggttgatgtgtgcgtcactcctatgaaacggaccaggaagagtggtgatatgcatgatgacggcaacggcagccctgctgtgagca

SEQ ID NO: 13592 - DNA, 375 bp, Zea mays
  Clone ID: LIB3158-017-Q1-K1-A6
atagttatagatcgcgagcgcctccctttttttttttttttgcataacatggatgatgatttaatatagatagttcatgacagatagatccggcatagccaaccatgaccatgactgccttacaactgattcaaacggaaagatactggtgctgctcacttgcatttcttactaccacgccacgacagaccaaaacgaaacgacactgctagtactactgatagatagtttgctccgacgacttcacgcaagagtgatccgagcgatacctttggaggggtaagggaaccgctaaaggcgacatgggactgatctgatccgacgcgacggtggcgccaagcctaacgccttttgttggggcagtcgcgggagatg

SEQ ID NO: 13593 - DNA, 307 bp, Zea mays
  unsure (1)..(307): unsure at all n locations; Clone ID: LIB3158-017-Q1-K1-B3
catcacgcccctcttttttttttgacccattgcagaatgcaaaataggaacgtgggctggtgcagtggagtaaggtcgcctggaccagtgttttcttttgttgttctttatcgggtatttgtctctggtttcttaaaagtatgtagagagtgagtgaattcgtggcatttttgcagttgatgggaccgtgttttgagactgtaacctgccaatcaagcgttggagattccccnnnaaaaaaaatataaaaaatatgaaaaaaaaaaaaaaaaaaaaaataaaaataaaaaaaaaaaaaaaaaaatag

SEQ ID NO: 13594 - DNA, 245 bp, Zea mays
  Clone ID: LIB3158-017-Q1-K1-D2
gggtgcatgtcttctatttctaggtatggtgcataaaaaagtaggaaccaggatgagattgtaatgctgcacatggcacatcaaggtgcgcaagatatgtaccgtagaaattatcgtaaagtgcacacagctgtatgtatagatgtttagaagtggccgaagttaggattgctcaaccggggcaatgatttacttagcctgctgaaatgtactatagttagcattcaagtttgtgaccatcatgc

SEQ ID NO: 13595 - DNA, 248 bp, Zea mays
  Clone ID: LIB3158-017-Q1-K1-F2
ggcaatggcaaatatacagtcaatgattcatatatgcatgcatggactgctatgctagctagcagccctttgtaaatatagtgtttaaggaaatgattcatatattcagcccttaaggacttggatgtcaaaaaaaaaaaaaaaaaaaaaaaaaaaaaaaaaaaaaaaaaaaaaaacaaaaaataaaaaaaaaaaaaaaaaaaaaaaaaaaaaaaaaaaaaaaaaaaaagaaaaaaaataaagggggg

SEQ ID NO: 13596 - DNA, 262 bp, Zea mays
  Clone ID: LIB3158-018-Q1-K1-A2
tcagagcaacggggggacggaagccgatgcgccggcgccgaagcgaccggcaaccgccgccgcaatcctttgccacgactgcagtcgccaccgacctggacgagctgctgctgactgcgccgccgccgtccgcgtcggagccccggagcttctcctatgcggtgaaacagcagtgctgggagaaggcggagcgggtgcccggacgtgacccggagaggtggcgccgcgatgcgctcggcaacatcgtcttccgcaagctcgt

SEQ ID NO: 13597 - DNA, 218 bp, Zea mays
  unsure (1)..(218): unsure at all n locations; Clone ID: LIB3158-018-Q1-K1-A5
ccggtcccgaatttcccggtccgccccacccgtccgtgtttgccctgtccgtcctttggtttcgcgacatctcagtgtgcatctccaacgatcataagttgaatgttatcattaacgtcagtttggttcagataaatataattgctagttatagcctgncaagccatacttcaatggcgcaacctatgtgtaccaaaaattatgtgaaacctgccttg

SEQ ID NO: 13598 - DNA, 393 bp, Zea mays
  unsure (1)..(393): unsure at all n locations; Clone ID: LIB3158-018-Q1-K1-A6
cgagcttgcaagtcaggggctcatgaacagtgaccagttcagcggcggcggttcggaggcacaggcggcggcagggatttttggcgggaacttcgttagtgctggtggagatcaagttccaccgccggtgctctacagagaccaagcctccatgctgccgcagatgtcggcgaccgctctgctccagaaggcggcgcagatgggcgcgaccacgagcgccaacggcgccggcgcggcgtccatgttccgaggcttcgcgggctcttccccacacgtgcggccagcgacgccgcacatggaacagagcgacgcgaacctgaacgacctgatgaactcgctcgctggaggcggtggcctcngtgccggcggaggaatgttncgcggcggcagcaa

SEQ ID NO: 13599 - DNA, 404 bp, Zea mays
  Clone ID: LIB3158-018-Q1-K1-B5
tggccccacccttccggcgaggagcggaccggaaaggagggcccttctgcttgtttctccgctttgcaagatgtcgtccccgagcaagcgccgcgagatggaccttatgaagctgatgatgagcgactacaaggtggagatggtgaacgacgggatgcaggaattcttcgtcgaattcaagggcccggccgaaagtatctaccaaggtggtgtctggaaggttcgggtagaactgcctgatgcatacccttacaaatccccgtccatcggcttcatcaacaagatttatcacccgaatgtcgatgagatgtctggctctgtctgtttggatgtcataaaccagacatggagcccaatgtttgatctagtaaatgtttttgaagtattccttacacagctgttgc

SEQ ID NO: 13600 - DNA, 301 bp, Zea mays
  Clone ID: LIB3158-018-Q1-K1-C11
cctgactcctgcttgctcctgcaactatagtgatcgtctatgctacatcatattcactcctgttgcttgaggccattccgcgaagccacaactcttacaatatgcatgcgccggccgacgacgacgcgcgctgcctctggtgagcttctgttcaagtgatgcatgtttcaaggcatccatggatgctttacgcatatgcgtattaattagccgtgtcagggaaccggacagaatggggtgctgatttatatctacgtcttctggtgatcaaataaaggggaaatatatgttggatgcgtgc

SEQ ID NO: 13601 - DNA, 132 bp, Zea mays
  Clone ID: LIB3158-018-Q1-K1-C4
agccttccggaacgttattaacccccctgcctactgttgtgcacacggcgctcatcaaggcggtggcccatgccatgtcaggggcgcatcgcgcaccgaccttctccatcctggacacgtgcttctagggcc

SEQ ID NO: 13602 - DNA, 399 bp, Zea mays
  Clone ID: LIB3158-018-Q1-K1-C5
agccttccgcggccccgtgggattttctctccaattttaattggcgtctttatgagcttactagtcaccttggagggaaagccctctcttgtggtgccaaagcttaaacaggaatggttatcatcagtgttggcgaattggcaattatggataccatttcagtttttgaatttttacttcgttcctcagaagtttcaggtccttggtgctaattttgtagcccttgcatggaatgtgattttatcatttaaagctcacaaggaagttatcgcgaaataggtatgaaggagcgcagtgaactcccccggtcggtccaggatagggataggatagtggcagctgaagctgtagggcttgtaaattgtcgccatgtgggactggagtggatcattctgatca

SEQ ID NO: 13603 - DNA, 379 bp, Zea mays
  Clone ID: LIB3158-018-Q1-K1-C6
caacgggcacggcggatgaaggccatccatatactccgagcctggtgtgtaccaaacactcatcctgtcgctgccacctaagatacttgagatatcgctctcacgtgtcagtttttcacttccgtgcgactatgctatgtacaggtctcaacagatcgacaggctctctatagaaatggtcagttcataccttctctgctgtgcgttagctctgaacatgcacaatgactactgactagaaagggcagctgttgtcccgtgcatacgatgctattcgcctcaaccttggacatctgaattcaaaatatcgtatatatagctggcatctagctagtgttgatgaggatagctgaacaaactgtatcactgggcaactgat

SEQ ID NO: 13604 - DNA, 356 bp, Zea mays
  Clone ID: LIB3158-018-Q1-K1-D2
acccttccgtttgaaaccaaggcttctgtcactagtgcagaagtaagccaggatggcaggttcatcactactgctgatggctcaagtgtaaaattctgggacgcgaatcactttggccttgttaaaagctatgatatgccatgcaatgtggaatcggcttcacttgaacctaagtctgggagtaaatttgtcgctggaggagaagatttatgggttcatgtatttgatttcttcactggtgaagaaatagcttgtaacaaaggacatcatggtccagtccactgtgtccggtttgcaccttgtggtgaatcatacgcatcgggttcagaagatggcaccattcggatctggcagct

SEQ ID NO: 13605 - DNA, 393 bp, Zea mays
  Clone ID: LIB3158-018-Q1-K1-D4
ggagctcggaactgtcatgcgatcactgggtcagaacccaaccgaggctgagctccaggacatgatcaacgaggtcgatgcggacggcaacggcaccatcgacttcccggagttcctcaacctcatggcccgcaagatgaaggataccgactctgaggaggagctcaaggaggcgttcagggtgttcgacaaggaccagaacggcttcatctctgcggcggagctccgccacgtgatgaccaacctcggcgagaagctgaccgacgaggaggtcgatgagatgatccgcgaggccgacgtcgatggcgatggccagatcaactacgaggagttcgtcaaggtcatgatggccaagtgagtaaagcctgcggtaacggtatactaccccgcggg

SEQ ID NO: 13606 - DNA, 338 bp, Zea mays
  Clone ID: LIB3158-018-Q1-K1-D5
aaagccagtaccgagtcctacgagcagtcgcacgcaagtgtcaagagacgaaacggtcgacatggctcgcacgcaatctgccgtagcggtcgccgtggtggccgcggtgctgctgctggcagcggcggcgacgacctcggaggccgccatcacctgcgggcaggtgagctccgccatcgcgccctgcctctcctacgcccgcggcacggggtccgccccctccgcgtcctgctgtagcggcgtcaggaacctcaagagcgccgtcagcaccgtcgccgacaggcgcgccgcctgcaactgcctcaagaacgccgccaggggcgtcagcggcctcaacg

SEQ ID NO: 13607 - DNA, 397 bp, Zea mays
  Clone ID: LIB3158-018-Q1-K1-E1
aaggtgatccgcaaggactccgccaagaagacggccaagaagtcccgcgtcaagtgcttcatcaagctcgtcaatttcactcacctcatgcccacccgctacaccctcgacgtcgacttcaaggacgtcgcctcgggcgggcccgacgcgctctccacccgggacaagaaggtcgaggcctgcaaggccgccaaggcgcgcctcgaggagaggttcaagaccggcaagaacaggtggttctttaccaagctccgcttctaggcgccgggcaccccgcatagtgactgctttagttgtcaatttgttgtatcggaaaccatttaagctatctctgttttggtattgcgcttgttatggatctcggagaagattttgttaaaaacatgtcgatgatgtg

SEQ ID NO: 13608 - DNA, 56 bp, Zea mays
  Clone ID: LIB3158-018-Q1-K1-E3
aaaaaaaaaaaaaaaaaaaaaaattttttaaaaaaaaaaaaaaaaaaaaaaaaaaa

SEQ ID NO: 13609 - DNA, 392 bp, Zea mays
  Clone ID: LIB3158-018-Q1-K1-E4
aggacttgaagatggctatcgcgtcgtcatcaatgacggcccaagtggatgtcaatctgtttaccacatccacgttcatctcctcggaggcaggcaaatgaactggcccccaggctaagaatatcttgtgattgatcagtgctaatgccaaggactgctactccatttctctagaataatccctgtaatttccataaaagctagtgcgcagtgcgctgaccttgtgctatatttgtggaattaccggaagcatgctgctgtgatctatgattggacacaagaaacttgtaactggtactcctatcatcgattgacttgtccttattgatcagctgatgggggttgcccactggccttgctgaaaaaaaaaaaaaaaaaaaaaaaaagggcgg

SEQ ID NO: 13610 - DNA, 393 bp, Zea mays
  Clone ID: LIB3158-018-Q1-K1-E6
acaacatggagcacctgaagaggattgccgaggagatgcagaagcaggtggctgctgccggtgcggcagcacaggtcaaggaagacaacgatgacgatgttccagagcttgttcctggagagacttttgaagaagtagctcaggagacaaaagcctgatcatcggctctaaatagtgaaatgttactgcaccaatgctgtgaggtcatggttttcgtgtgatggcactcttcttcctcccctcctaggccagccccagccactctttgtgttcgctgttggaaacttttagtttctccatctcaagcttttacctaaggttgtgcatgttgagatgccatggaaatccattttgctgattatttggtttgtggtcggttcacaacattacatg

SEQ ID NO: 13611 - DNA, 387 bp, Zea mays
  unsure (1)..(387): unsure at all n locations; Clone ID: LIB3158-018-Q1-K1-F1
attactttttgcagaaacttttaattctgaagggcgacgatggctttcgaatgaatgatgttcttgtttctctatggtccattatgggcctttggccactagtctacagtttgttgctccttcctactggtagaagttccaaaagcaagattcctgtgtggccattcctggttctttcatgcatcggaggagcatatgctttgattccttactttgtcttatggaagcctnctncaccttccattgacgaagatgaaattggacaatggccattaaaatttctcgagtcaaagttaactgcaggactagtgtttgccctgggcattggactgatcatatatgctggcaaagctggtggcgacgattggaaggaattcattcgatact

SEQ ID NO: 13612 - DNA, 280 bp, Zea mays
  Clone ID: LIB3158-018-Q1-K1-F12
gagcacggcaattcgtgagggccctgcctcagtgccaacacatattccacgtgcggtgcatcgacagttggctcctccggcacgcgtcctgcccgctatgccgggccggtgttcacatagaccatatacatatgtaaatgaactcgcagggtggcacctggtgtattttcgtagcgaatacccgtgctcctgttggatatcacaagtatagctgtatacatagggtttttttgccagaattcagggagcttgttagtcggtccattttcctagatcgcga

SEQ ID NO: 13613 - DNA, 328 bp, Zea mays
  Clone ID: LIB3158-018-Q1-K1-F2
gcaaaggagcggggcgaggtcatcagcaccaagaggcagccgttgggccccaagcctggcttcatggttgaggggactaccatcgagaccgtcactcccatcccgtacgatgtggtcaatgatcttaagggaggatactaggttgtttgtttggtctttctacctgttctacatctgtgttactctagtgcgtacaattttgctcacactgagcagtatgaacctattgtgcgttcatgttgaaagatttcccgttctgtgcaaacctgagtttagaagaatgctatgccttgatctttgcttctgacaacaaagatttgcctttttc

SEQ ID NO: 13614 - DNA, 394 bp, Zea mays
  unsure (1)..(394): unsure at all n locations; Clone ID: LIB3158-018-Q1-K1-F4
gtcacctatggctctgccgaggaggtcaacaatgccatatcaaaccttgatggcatagacttggatggtagacagatccgagtcacggttgcagaatcaaagcccaggcgtgaattttgagattttgttaaggtggtttagaggtcaatagcgtgtgttcacaagttctagtttgtagcgtctattctttcttccgtatgagtaacaagaagatgctgataatgagagactggaagtgaaactgctgtccacaggaagatatttttcccannnaaaaaaaaaaaaaaaaaaaaaaaaaagggcggccgccctttttttttttttttgaagcaaagcaagccaataatgattcattcattcagtaggagaaaggagatgagatctcatacatagt

SEQ ID NO: 13615 - DNA, 395 bp, Zea mays
  Clone ID: LIB3158-018-Q1-K1-F6
ggaggcggacaaggtaagcagcattcgcaggaaccctagcgccgccgcacccgcaggaatgggtatcgacctcgtcgccggtgggaggaataagaagaccaagcgcactgcgcccaagtctgacgatgtctacctcaagctcctcgtcaagctctaccgtttcttggtcaggaggaccaagagcaatttcaacgctgtcattctcaagaggcttttcatgagtaaaaccaaccgaccaccaatctccatgcgccgccttgtcaagtttatggaaggaaaggagaagaacattgctgtcattgttggcacagtcacagatgacaaaaggatccaggaggttccagcaatgaaggttactgccctgaggttcacggagacagcaagggccaggattg

SEQ ID NO: 13616 - DNA, 62 bp, Zea mays
  Clone ID: LIB3158-018-Q1-K1-G1
tccgagttaacctgcttaatagatggtccgactgccggttacatgtttggctctagtcaata

SEQ ID NO: 13617 - DNA, 194 bp, Zea mays
  unsure (1)..(194): unsure at all n locations; Clone ID: LIB3158-018-Q1-K1-G2
agccttccgggaactcctaaaccttaaatctaaaaatagctggggattgagtttgcattgcatcgggtttttgccggtctaccaggggactataaaaatatgggaataaccaataacccatgggggtaaaaaaaaaaaaactaaaaatgaccgcactcggaatgataacagacaacaccaactaaattnanttt

SEQ ID NO: 13618 - DNA, 399 bp, Zea mays
  Clone ID: LIB3158-018-Q1-K1-G4
gtcgcttccagccgccgccgcgtccgcctcgccaagcgcagcagccgccgcagcaacatcgctctcttgatctcagccatggcggaggtggagcagcaacaggacacgccgaagctcttcaaccgctggaccttcgatgatgtccaggtgaacgacatctcgctgaacgactacctcgctgtgaacgcgacgaagcacgcgatgtacctgccgcacaccgcggggcgctactccaagaagcggttccgcaaggcgcagtgcccgatcgttgagcgccttacaaactccctcatgatgcacgggcgcaacaacggcaagaaggtcatggctgtccgcatcatcaagcataccctggagatcattcacctgctcaccgatgccaaccccatccaggtcgtc

SEQ ID NO: 13619 - DNA, 288 bp, Zea mays
  Clone ID: LIB3158-018-Q1-K1-G5
gtagtcggattataaaactaatttctcagccgaagattaaaaagtgagacgaatctagtccagttggttggatctatatttcatactcctatttgaaagtcaaacgattaatgtgacccgggctaaattttagtccacggaaccaaacaccccctaagcacgtttgttgagttgtaatggattcacattatgtgcattcgagacaggtcgaaggaattgtatctctagagtgaaaatttcctttttcaccggtatacacagaagctctataatagcggttgtgaacct

SEQ ID NO: 13620 - DNA, 393 bp, Zea mays
  unsure (1)..(393): unsure at all n locations; Clone ID: LIB3158-018-Q1-K1-H1
gttcttcccttgggtcccgcagctgcaatccctttccttcctcgggggacctagaaactcgtttttcaaaacccccatgccaactggccctggtctgtgtgtgctttagttgcgtccatgaccatgaatgagaatgaacctgtggctggttggttggctggttggctggcatggcatgcangggagttcgcggcgttcctgacgggggcgaacctgatcatggagtacgtcttatccaatgccgctgtggtgcgcagcttcacggcgtacctcggcaaggcggtgggcgtggacgcgcccagcaagtggaggatccccgtgccgggcctgccccaggggttcaaccaggtgggaccttgtgtattataatgtatctgccaacatctgatgctc

SEQ ID NO: 13621 - DNA, 188 bp, Zea mays
  unsure (1)..(188): unsure at all n locations; Clone ID: LIB3158-018-Q1-K1-H2
aaaatgcagaaaagggtgtcgatttcgtgcgcctgttcaaagctgttttgagtcagccacgcctttgaaaaatctgaggtggtcatcgctgggttaagccgtgttcacaggttggtcgcctactttgttattactggtgatgtaagttgacctggtccttttgaaagagaaggtttacccgtcttana

SEQ ID NO: 13622 - DNA, 382 bp, Zea mays
  Clone ID: LIB3158-018-Q1-K1-H5
ggaagagcaaaagtcttgttgcttaccatgaagttgggcatgcaatttgcggaactttgacacctggccatgatcctgtccaaaaggttaccttaatcccaaggggtcaagctcgtggtcttacatggtttatcccgatggatgacccaacactcatcttcaggcagcaactttttgccagaattgttggcggccttggtggtagagctgctgaggaggtgatatttggagagcctgaggtgaccactggagccgctggtgacttgcagcaaattactggcttagccaagcagatggtggtaacgttcggtatgtctgaaattggtccatggtctctgatggagggtggggcacagagtggggacgtcatcatgcgaatgat

SEQ ID NO: 13623 - DNA, 164 bp, Zea mays; identical to SEQ ID NO: 9444
  Clone ID: LIB3158-005-Q1-K1-A5.F2

SEQ ID NO: 13624 - DNA, 163 bp, Zea mays
  Clone ID: LIB3158-005-Q1-K1-A5.R2
gtaatatcttgtttggagttgaatatcttatcttgcttgtgaaatcgaataggcctatatatgttatgctgtacgagtatgtggctccaaatttgtgagccttctgtctgttatgaatccaatttgtgagcacacatgaatcaatttcgagattcgacatgtc

SEQ ID NO: 13625 - DNA, 702 bp, Zea mays
  unsure (1)..(702): unsure at all n locations; Clone ID: LIB3158-010-Q1-K1-G11.F2
gcttattaaaacagtagactatatacagatcacttgcacaaagattgttactgaaagaaacatacaacttctcccacctggccaccctacaccctcaggttcgttgctgctaaaggtaacaatttccgaacaattgattcatacaaatgccgggacctcaataccagggcatgggcgtcttaatggcactatatacattcattacatacatagtcctaattactagctaagtagtcgaagaagaggcaaggcaccgtccatcttgcagctgaccgcttctttcttcaaaccagggacctgctaaataagccaatggatactcctaccaaacggcacgaacaaatgggaaatggcacgcagatgccagggtgcctcttccaggaggctcatgctggcaaggcagtccaaaagcctccaaaactcaaggcagttgaatgccaaccacaacttcagcccacggagcaaccgtgagcattcacccccataatcaaatgatggaaataacaaaattagagggacgttagcactcttgcagttnttgttcatagtcattcagacagtgagttcgcagcgctcagcttgctgctgtcactgctaaccggtaactntgacttggatgtcagcttctttgccttctcgtatgtgtaaatgtaaatccttttcaccatcctgcanaactcactgaaggaagatgcattgcac

SEQ ID NO: 13626 - DNA, 692 bp, Zea mays
  unsure (1)..(692): unsure at all n locations; Clone ID: LIB3158-010-Q1-K1-G11.R2
gcagtaggaagggctgtagacctgacaaagcttagtggctacagcgatctttgccagaagctggaggagatgtttgacatccagggggagctgggttccacactaaagaaatggcgggtcattttcactgatgatgaggatgacatgatgcttgttggagatgatccttgggagtaagaaccctttgtctctgtattaacgagtgcatgttttccattattggaagtcctaatccctgtgcaatgcatcttccttcagtgagttttgcaggatggtgaaaaggatttacatttacacatacgaggaggcaaagaagctgacatccaagtcaaagttaccggttagcagtgacagcagcaagctgagcgctgcgaactcactgtctgaatgactatgaacaaaaactgncagagtgctaacgtccctctaattttgttatttccatcatttgattatgggggtgaatgctcacggttgctccgtgggctgaagttgtggttggcattcaactgccttgagttttggaggcttttggactgccttgccagcatgagcctcctggaagaggcaccctggcatctgcgtgccatttcccatttgttcgtgccgtttggtaggagtatccattggcttatttagcaggtccctggtttgaagaaagagcggtcagctgcaagatggacggggccttg

SEQ ID NO: 13627 - DNA, 689 bp, Zea mays
  unsure (1)..(689): unsure at all n locations; Clone ID: LIB3158-014-Q1-K1-E2.F2
cacgtaaatccctccagagggagcagaaagttgttaaccttgaattacatgaagaaacacagagaaatgtgacaaaaaaacaaagaagcaagaaaatcggaatcatcacgccaagagcttgtggcgatcgatgatccaaatttgaaatagatgcaactctaaaacctaaaaccatcgaccatacctcctcctggatcaccttgctgcatacaaccatgtgtgcgtgaactagcaatccctactactgctccaaaaccctagatgcgtgagccattcagctcgccatacacacatgcacgtgcgcccgatccactgcatggatcattgcatccacgcgccggctaggtatggcggatggcgcccttgcttctcctgtggttcatgctgttccacgtaggcgtactcaccgagcttgcatcttgcgtcgacggggatctctatcatggcctccacgcgctcgcccacacgagaggctgttccttccacgccaggaagacgcctgctccggcttccgagtcgtctaaaccggcgtcccgcatcgaccagccttcccgataccgacggagcaacgaccgcacgtcgtcggcaacgtcctcgctgaacgccaccggagaagaagccgaagaccgcatgcggcgggcccatgaagccgncgtctcccgccggttcatggactccgacgccgggca

SEQ ID NO: 13628 - DNA, 723 bp, Zea mays
  Clone ID: LIB3158-014-Q1-K1-E2.R2
ctcgctgcgcggcgtggtgccgggcggtgcgcggagacgggacgcgttcgccgcgtccctccggcgtctcgatccgcgggttgttactgtcgtcgaggaggaggctgatctcgtggcttttgaccccggcgcgcccgatgaaagcggcgacacggaggcagcgttcctgaaggtgttcggcgagggcttgcggttcttctcggcttacatggactcgctggaagagagcttccccaagactagcaacgagaggctggcgctggagaggggagccggacgtgccattgtagacttggtctcgtgcccggcgtcggagtccatggagcggcgggagacggcggcttcatgggcccgccgcatgcggtcttccggcttctctccggtggcgttcagcgaggacgttgccgacgacgtgcggtcgttgctccgtcggtatcgggaaggctggtcgatgcgggacgccggtttagacgactcggaagccggagcaggcgtcttcctggcgtggaaggaacagcctctcgtgtgggcgagcgcgtggaggccatgatagagatccccgtcgacgcaagatgcaagctcggtgagtacgcctacgtggaacagcatgaaccacaggagaagcaagggcgccatccgccatacctagccgggcgcgtgtatgcaatgatccatgcagtggatcgggcgcacgtgccatgtgtgtatggcgagctgaatggc

SEQ ID NO: 13629 - DNA, 156 bp, Zea mays
  Clone ID: LIB3159-002-Q1-K1-C7
ggacgcgtgcaattacgtgatgggttgcaaactctacaaactggtgcacgtatgccgggccacgctcattaatcgtctctgatactatgctattggcagctccagctcggttcatgaccgatcaatgacaggattggcagcggctcacagctggct

SEQ ID NO: 13630 - DNA, 425 bp, Zea mays
  Clone ID: LIB3159-002-Q1-K1-C8
cggacgcgtggggtcggatctgagacgagacgagttaccatctcatcccaactccggagcgaacaagttaccatctcatcccaactccgcctcgaccggatctcgtcggactcggatccgcccgaccaccccgggccgccgcagatcaaagaagatggcagctgtcgacacattcctcttcacctcggagtctgtgaacgagggacaccctgacaagctctgtgaccaggtctcagatgccgttcttgacgcttgccttgctgaggaccctgacagcaaggttgcttgtgagacctgcaccaagaccaacatggtcatggtctttggtgagatcaccaccaaggccaatgttgactacaagaggattgtcagggagacctgccgcaccattggtttcgtgtcaaacgatgttggccttgacgccg

SEQ ID NO: 13631 - DNA, 258 bp, Zea mays
  Clone ID: LIB3159-002-Q1-K1-D1
cgcggatgaagaatctaccttctccagagatggaaggtgttgatactcttctgatgtatctttatggagcacttcatcttgttgatgacatggagaagctcgcatcatctcagaatagctgatttgtggatgaactggaatcccttttggatgactctggacatttgcggacacttgctttcttgtatggcagcaaaggaatgttctccaaagccctttctatatggcgcgtactgtccaagaattatagtgcaggtt

SEQ ID NO: 13632 - DNA, 366 bp, Zea mays
  Clone ID: LIB3159-002-Q1-K1-D2
gcgcgagatcgccgccccgtgtgggccctagatcccgatggcctcgcgccgccgcaccctgctcaaggtcatcatcctcggcgatagtggggttgggaagacttccttgatgaaccaatatgtgaacaagaagtccagcaatcattacaaggctacgatcggcgcggatttcctcaccaaggaggtgcacttcgaggacaggctcttcactctgcaaatatgggacactgctggccaggaaaggtttcagagtctcggcgttgcattctaccggggagcagattggtgggtcctagtctatgatgttaattctatgaaatcatttgacaacctgaataactggctagaagagtttttaattcaggc

SEQ ID NO: 13633 - DNA, 258 bp, Zea mays
  Clone ID: LIB3159-002-Q1-K1-D3
gaacctttttcaagtattctaggtgcacactcagtatcgagtgttcctcctgcatactatgctgacctgacaaccttccgagctcggttctacatggagccagattcgagtgacagtggatctatggcaagccgcggccctccaccatgggggcgcaacatcaacgctggttgtgttggaaatgatgctgagagagcattaccatccactgagagacatcctaagcggtgaaacctgtgactttctacacatgctata

SEQ ID NO: 13634 - DNA, 316 bp, Zea mays
  Clone ID: LIB3159-002-Q1-K1-D4
cccatccgcacctctctccatctccctgctcctccgccttcttcttgatccagccaagccagggatcgccatgtcggactcggaggagcaccacttcgaatcgaaggccgacgccggagcgtccaagacctacccgcagcaggctggcaccgtccgtaagaacggcttcatcgtcatcaagaaccgcccctgcaaggttgtggaggtttctacctcaaagactggtaagcatggtcatgccaaatgccactttgttgccatagatatattcaacggggaaaaagctcgaagatattgttcccttcgtcacacaact

SEQ ID NO: 13635 - DNA, 323 bp, Zea mays
  Clone ID: LIB3159-002-Q1-K1-D5
ctcgtccaaagactccaagctcctgtgcggcctgtgttctgctgccgcctctggtccacatctccccgccgccgccccgtcgtctgccgacacctttagcgctgggaaggatcacaggggatcggcgcgaggcgggggacctgcggtttttgtcgcccggatggcggcggagcgatgacactggcgtcgggagcggcgcggcgttgggatgcggaccatctgcgatgtgtgcgagagcgcaccggcggtgctcttctgtgcggccgacgaggcagcgctttgccggccctgcgacgagaaggtacacatgtgtaacaagcctt

SEQ ID NO: 13636 - DNA, 418 bp, Zea mays
  unsure (1)..(418): unsure at all n locations; Clone ID: LIB3159-002-Q1-K1-D6
ctggggtgagtgggggttaccagagcaacaatggccataacaccagctctggtagctatgatggtagaagtgatggtggcaggtacgggcaggcacagcagggtagtggtgtctatcctggctatggtgctggggcagctggatatggatatggtgctaaccctgcaattggatatggaaattatggggctggaggatatggaggtgctcctgctgcttatggtggacattatggaaacccacgtgcagctggttctggttaccaaggtggacccncaggctcaaatagaggaccttgggcagtcaagctccatctgcatatggaaactgagggtatggtggcagtgctggctatagtgcttggaacaactcttttggtggtggcaatgctccactagtaaacccctggcggacctgc

SEQ ID NO: 13637 - DNA, 290 bp, Zea mays
  Clone ID: LIB3159-002-Q1-K1-D7
accggccggaatcggtcgacccacctctgcctattttagcggagagagagaggaaagctagctgctgcatggaggcgcgcagaagcagagcgggtgtgcctgtctttcactgggttagctcacgacgcacgcccctctgcaggatcctcacgggtggctgacatatccgagggatttggcatcatgaagcatcttggggaaactggtttctaccatgcttcggagcatggttgcaagcatgccaaattgatgaggaatctgactacgctttgtaattggtggagaacaca

SEQ ID NO: 13638 - DNA, 338 bp, Zea mays
  Clone ID: LIB3159-002-Q1-K1-D8
gtcccgtcggccggacgagcagggcccaagggcccaccttaccatggctaccgccactgccgcccccgtccccgccggcggccacccgtaccgtcgcgcccgcactcgctgcggcccaccgcgcctgcaccgcctgcgctttccggccgcagcagcagccgcttcgtcttccctgcccgccccgtcgtccatgctgccaccgctgccagatggaggcggtcggctggtggcggagctggtgtgcgcgttcaacgagctcacggagcggatggtggaggacctggcgacgtcctactcgtcgagcctgctctttcgtgtgctgaaactggcgctccccg

SEQ ID NO: 13639 - DNA, 252 bp, Zea mays
  unsure (1)..(252): unsure at all n locations; Clone ID: LIB3159-002-Q1-K1-E1
cggacgcgtgggcgactccgccgccgcttccgctccttcccagcgcatcgccctccgccacagcggaccgcgacctcatctatcacctncagctttcaatcatggcggacgtcgatgncgaaccggaggttgccgccggagctcccaagaagatggcgttccgcaagtacagctaccgtggcgtcgacctagatgcgcttctcgacatgtgcactgacgacctcgtncagctcttccccgcgcgcgccagga

SEQ ID NO: 13640 - DNA, 258 bp, Zea mays
  Clone ID: LIB3159-002-Q1-K1-E2
cgcagcgcaccttctcttctccgccgcgtcgccgccgaacatcagcatcggatcgatggagggctgggacaaggggaccaagagcacggtgggcgagatcccgctgctgtcgacgcgcgcgggtccgcgggacggcgaggcgtggcggcagaggctcaaggaggagtaccgcgcgctcatcgcctacacgtcggtgaacaaggccaaggacaacgactggttccgcatcgccgccggcaacccggaggggaacccgct

SEQ ID NO: 13641 - DNA, 365 bp, Zea mays
  Clone ID: LIB3159-002-Q1-K1-E3
ggctcggcaagactctccaggcgattgctatagcatgctgtttcaaggacgagggctctatattgatagtatgtccagctgtattgcgttattcttgggcagaggaattggaacgctggcatccttcatttatgccaaaagatattcatattgtatttggtcgtcaagacagtcttgaacatctaaatgctactccaagggcagtgattatatcttaccagatgctaagtcgccttagagaaagtatggtgaatagaacatgggcactgatgattgttgatgaatcacataacatacgctgcacgaagaaactagaagaaaaaatatgagacaaaaagctgtgctacatctagctttaaaaactg

SEQ ID NO: 13642 - DNA, 186 bp, Zea mays
  Clone ID: LIB3159-002-Q1-K1-E4
gtgcagatcgccatctctgcttccaacaccggcggtgcatgggacaatgccaagaagtgcatcgaggctggtgccagcgagcacgcgaggaccctcggtcccaagggatccgactgccacaaggccgctgtgatcggtgacaccattggtgaccccctgaaggacacctccggcccgtacctcaac

SEQ ID NO: 13643 - DNA, 288 bp, Zea mays
  Clone ID: LIB3159-002-Q1-K1-E5
gcccgtctcttcatctattcatatgctactgcagagaaagggtctttgcacgagtattggggggaacatgatgctaagagcttgaagacattttgtcaagaacacctgccaagattctccaaacgggtagatattagccaattcagcttccctgtaaatgttctaccaaaccttcctcaagtgctcttactatcgagtaagaaggacacaccagcaatgtggcgtgctatcagtgggatgttccgcaatcggataatcttttatgatgctgaggttcacgatgtttct

SEQ ID NO: 13644 - DNA, 254 bp, Zea mays
  Clone ID: LIB3159-002-Q1-K1-E6
ccagccgcgccccgtctgcctcctgcttctctctccgcttccgcttcctgcgcctccaggctccacttctccgctcggcagtcggcactggaaggacagcatgtcggtctcggcgtcgtcaccggcggcggcggcgggcgatgagaagcaggaggcggcgcccgtcaggcgctgcaagggcgtcaacgacctcgacaaggtcgttctccgcgaggtccggggcagcctctcagaggtgtacttgtatggttggc

SEQ ID NO: 13645 - DNA, 391 bp, Zea mays
  Clone ID: LIB3159-002-Q1-K1-E7
cggacgcgtgggtgaacgccggcagcgcccggatgacggcgtcctcgaggccgcgcggcgcggcgctggaggccggggtgccgccagtgctggtgcggacgcgggcgcgggcgcgctgggggcggcgggagacggcgtcggacgcgctacggtcgcggtgccaggtgaggcagcagcggatgacgaagacgtagtaggcaaggatgaggacgcaggcggcgaggatgcccagcaccgtgagcacgaggatcgggaagctggtgatggatggcgcgtggcgcgaggaggaggaggaggaaagggagagggaagaagatggcaatgccgccgccgccggcggcggcggggggaagagcatagctagcgccgggacctgcggcaccgggaagat

SEQ ID NO: 13646 - DNA, 420 bp, Zea mays
  Clone ID: LIB3159-002-Q1-K1-E8
ggaggtcgaaaggctacttgacctttctccagacacattcttctccatccatgcacatgcagaagatggatctcctcgtaaaggaggaggttccttggccccacctttcccatctccatgtaccttgcggactgcgcttctacgatatgctgatctactcaatccaccgaagaaggctgctttgcttgctttagcttctcacgcatctgatccagctgaagctgaccgacttaaattctggccttctccttctgaaaaggataagtattctcaatggatacctgttagtcaaagaaccctttttgaagtattggccgatttcctttaacttaaccaccacttggagtggtttttgcaagcataactccttgtctgcgaccaccatactactcaatttcatcatctccaaagatggcttcc

SEQ ID NO: 13647 - DNA, 433 bp, Zea mays
  unsure (1)..(433): unsure at all n locations; Clone ID: LIB3159-002-Q1-K1-F10
ggccgacccacgcnacttttacgctttgtcttttttttaaatctgccttttcattccgggattcttggtgtanttatcggactacttaaggactaattaaggtaaaacattcatacccttttggtgttgaccctgttttgcattgtatccgcatcgagcttccgtttctcaattcacttaaaattaagatttccattcttcttggagttgcacaaattaaccttgtgattttgatcaactacttcaatgcaaaattttttaagaacagtcttaatttgttgtaccacttcattccccaacttatcttttttaacaacttattttgttacccttcctttcttattattattaaattgtttcaccttgttaaaaacacatctataccattttattatctacattttccttatcccaacataataaaatttttaaa

SEQ ID NO: 13648 - DNA, 271 bp, Zea mays
  unsure (1)..(271): unsure at all n locations; Clone ID: LIB3159-002-Q1-K1-F2
gagcccgggaccacgaggcagccagaagacgcgcgcgcccctctcgggtctcggccgcgccgtcgcgctcaccaggtctccaccatcaccagagtggcggcgctctctcctatcgcggcgagcgacggcggcgatgggaggaggggagatggcggtgtggctgaaggcactggcgtacagcgccgggggcgtagcggtggccggcctagcggcgttggttgcgctgcangagcgcctcgtctacgtgcccgtgctcccgggtctggcgcgc

SEQ ID NO: 13649 - DNA, 283 bp, Zea mays
  Clone ID: LIB3159-002-Q1-K1-F3
gtggcttctcataaccatcttaccaagtcttcctccgattagggttccttacggtttagtggaggggcgatcgcgaccgctgatgtcacctaccgatacttcatcgtctgtcttgcctctgccatcagcaacgactcctttgagaataccttgtgctcctacagccatttctttgattgcaacttcatcacctaccggtagacgtataggttcctcttctatcactttcttacctactgcttcgagaactccatgctcgaagctatcgagaacatcaacggca

SEQ ID NO: 13650 - DNA, 258 bp, Zea mays
  Clone ID: LIB3159-002-Q1-K1-F4
cagcgaagtgcgagcgacccacgtccacacgacacgaaccaccaccaccaaccagcagcgcggacgacgcacccagcgcaaagcgatggcgtcactcaccatgatggcgtccttcgccgccgtggcggtggccgcgccctcgcgccgcggcaccttcgccggggtcaggtccgccaaggtcgaccgctgccaggagcccgccacgctagcagcaaccgaggccagggcccgcagcgactgacgccgtgcagtcatgct

SEQ ID NO: 13651 - DNA, 371 bp, Zea mays
  Clone ID: LIB3159-002-Q1-K1-F5
ggaacagacgctaggatgtttcggaacaccaagtgtccgcactactcgaaatgtagctggtatgaaatgaaatgctctgaaccagaaatgtcgatgggcataagcaagcatggttcatgaaagaacttcatgtatattttttacgaaggggtctaggtggctacgttatttttgtttcttgtgttctttagtgtagcactgaacaggagaataccaattgatctctattagcttgcttagtggtacaagcactctaaatggttgaactgggtggcgttgacgctatggctgccgaagaataccaattaatgatgttggttgactgtaatatccttaagtgggaacaagtcccacttctgtataaaatgatt

SEQ ID NO: 13652 - DNA, 373 bp, Zea mays
  Clone ID: LIB3159-002-Q1-K1-F6
atcgagggcatgaacggcaaggagctggacggccgcaacatcaccgtcaacgaggccgagtcccgcggcggccgtggaggcggcggctgtgggtacggtggtggccgtggaggcggcggctacggcggtggctggcgccgtgatggcggtggcggctacggctgtggcggctgctacggtggcggcggcggctacggtggtggtggcggcggctacggcggtggcaaccgtggcggcggctacggcaactccgacgggaactggatgaactgagcggtggggcccgcgcggccaagttatcctgttcgctaccgtgatgtttaccctagtccagaaggtttatcttcgttcgggtcgggtttgttgttgccca

SEQ ID NO: 13653 - DNA, 110 bp, Zea mays
  Clone ID: LIB3159-002-Q1-K1-F7
acaaatcattatcccccctacatttttcatctatatcacgaactcgcttatagtgtgcgggtatcaaacggatttaccgtaccttacccagtgttttttctttacatact

SEQ ID NO: 13654 - DNA, 316 bp, Zea mays
  Clone ID: LIB3159-002-Q1-K1-F8
cggagactttcgccaagaaccgcgagctggaggtgatccactgccgctgggccatgctgggcgcgctcgggtgcgtgttcccggagctgctcgcccgcaacggcgtcaagttcggcgaggccgtgtggttcaaggccgggtcccagatcttcagcgagggcgggcttgactacctcggcaacccgagcctgatccacgcgcagagcatcctggccatctgggcgtgccaggtggtgctcatgggcgccgtcgaggggtaccgcatcgccggtggcccgctcggggagggggtcgacccgctgtaccccggcggcag

SEQ ID NO: 13655 - DNA, 324 bp, Zea mays
  Clone ID: LIB3159-002-Q1-K1-G1
gactcttctctgcatttatgtatttgcaatgtcagccttgtacatcaagtttatcatggatgaggattatccaacagtatggaaggctttcaaacactctcccgcttctttggggcttctgatatattgtttcattgctctctggtttgttggtggactcactggatttcatatgtacctcattagcaccaaccagaccacgtacgagaatttccgatacagatcagacagcaggcctaacatctatagccaaggatgtctgaataactttctacaagtcttctgcagcaagacaaagccttctaaacacaagtttcgggccta

SEQ ID NO: 13656 - DNA, 392 bp, Zea mays
  Clone ID: LIB3159-002-Q1-K1-G2
gttgaaaatacagggtccagaatgtaaccacagataatgataagtcaggtaggtacgagacccagcaaccccttgcacgctatagcaaaagccagctcaagccaggtgaatgtctcggtagcaatcctttggtgatacacttcttttccgatttaagttgagatagagtagggttccgtctccaaagccaaagaagttacttgggggcaacattcttcagcgcgcaaatcttgtccttccccatcgcaaaatggaaaatcacaaaaagattctttccggttttgaaccctttcttaattttggccacaagaatcttattaattgggaagctaagaacattcttaatggtggcattttaagtaagaagggttacaaattcattcttaaaaata

SEQ ID NO: 13657 - DNA, 415 bp, Zea mays
  Clone ID: LIB3159-002-Q1-K1-G4
gacgccacgcgtccggcagaactcaagaaaacactggaaggcttggcaagacatctatttggtgctgtagagatgcgatgggttgacacttacttcccatttaccaacccatcctttgagctcgaaatatactttcaggatgattggttggaggttttggggtgtggagtcaccgagcaggaaattttgaaaagaaatggcaggagggaccatgtggcttgggcctttggattgggcttggagcgccttgcaatggtcctttttgacattccaaatattcgactcttctggtcgaatgataaacggttcacgtcccagttctcagaaggcaagcttggtgtcaagttcaagccattttcaaagtttccttcttgttacaaggatatgagtttctggatcaatgatgcatttacag

SEQ ID NO: 13658 - DNA, 423 bp, Zea mays
  Clone ID: LIB3159-002-Q1-K1-G5
aagttttcaaccaaatttggaaaagaggtggctagtgccactcctctccgtggatcagatgctgtgttgaaagcccacaatatggctgaggatgtaaggatccaatacgacgaccaagaaggtttcgagcagatagctcgtcaatttggaatattcgaagaatggaaggatggcatcccaagaacggcttacaaaggagtggtggtcttccggtacaacagtagtcaaaggcgaatatttctcgtcagcccagattctcttcgtcagctgggggtgtagcatgttgagaaggtagatttttccccttggaatggcaaatatcatggaattgcttaaccatgcatcccgattcctccatgctcaccatgccctgaagttggagcttatcagcaaccaaagctgggtctccaattcatagtcaca

SEQ ID NO: 13659 - DNA, 173 bp, Zea mays
  Clone ID: LIB3159-002-Q1-K1-G6
ctccatgcctacttccagagtgctattcaaagaggttgacgccccttcagcatccccagctttgtggaatgggccacaggtagccattttggatgacagagccacaagggtgtccttcatcaaggccgtgctagaagcttcaggattgctgtctgaggaaaattcgcaaattt

SEQ ID NO: 13660 - DNA, 384 bp, Zea mays
  Clone ID: LIB3159-002-Q1-K1-G7
ccgcctatggacaagcatcggctcctagttcacattcttagacatcaagaaaggggctgagaaatcatcatatcttgctcaactaataaaatgtgccaccagcttgctcgtggcattgatcgcaaccttaatgctttaagcatacatggtcgtaaatcacaggccgaaagagataatcttcttaatcagtttttaacaggcagggctccaacattagtagccacacatgttgctgctcgtggacttgatatcaaagatatcagactggcactcaattatgactttccaactggtatagaggactatttgcatcgcatacggcgtacaggaagagctcgcgctactagagtctcgtacacgtttttctcttaacaatattggaaa

SEQ ID NO: 13661 - DNA, 430 bp, Zea mays
  Clone ID: LIB3159-002-Q1-K1-G8
gtgaaaatcactatcacgaacttcaacttccgcatgaattacacacagtggagcttaggtgctcagcatccaaactttgataatatcactcagttgttcagcttcaactacaaaccacttactccatatgggggtggcataaatgatacggcaatgttctggggtgtaaagttctacaatgatttgctgatgcaagccggcaaacttgggaatgtgcaatcagaactgcttctccgcaaggactcacggactttcacattcgaaaagggatgggccttcccacgccgagtgtacttcaatggtgataattgtgtcatgccatctcctgaaaattatccatggctgccgaatgcaagccctctaacaaaacaagcattgacactcccactcttgatattctgggttgccttggctgttctgttggcttatg

SEQ ID NO: 13662 - DNA, 310 bp, Zea mays
  Clone ID: LIB3159-002-Q1-K1-H1
gcgaccgaatccaacaggagaggaaaggggcgcttgctttatattccttctcggctgcgagctgcgtccattcatccagccgtctcggggcagccaagaggtcgtgtgcgcgtggatctctccgtagaagggatgaagatcacggcgctccttgtgctgaagccgtcgacctcctgagccggtagctcctcgtccggcggccagtcaggcccggaggcggacgtgctcgcgaacgcgacggacgtcagccacttcggctactttcagcgcagcgccgcccgcgagttcatcgtcttcgttgcccgcaccg

SEQ ID NO: 13663 - DNA, 388 bp, Zea mays
  Clone ID: LIB3159-002-Q1-K1-H3
gcttctcgcatcaaagttcttcaagctcatgatgatctagtaaacaaaatgaaagacgaggcgaggaaggaactcctccttgtcagccacaaccaccatgaatacaagaaccttttgaaagatctaattgttcagggcttgctccgtttgaaagagccagctgtattgctccgttgccgcaaggaagatcaccatcatgtggaatcagtactgcattcagcaaagcacgagtatgcatcaaaagcagatgtccatgaaccagagatatttgttgaccatgatgtgtacctaccacctgccccaagccatcatgatgctcacggccagttttgctctggaggtattgtcttggcttctcgagatggaaagattgtgtttgagagtacac

SEQ ID NO: 13664 - DNA, 407 bp, Zea mays
  Clone ID: LIB3159-002-Q1-K1-H4
ttctttgtcgcgctcttggcgcccctctcggcgatttgcttgactctgatgggtttggggtgtggtgcgtgcaggcagggggcagcactaatcgaatcgagactagcgccatgaacccgagaggttagtctctcttcgtctattgattgtatgccctgttcctattggaaaatttatgcactttgtgcagccatcgtagcaacagaacttctctcttcgatggcattgaggagggtggaatccgagcaacatcctattcttctcatgagatagatgaacaagaaaatgatggaactattgatggactggaagatcgtgtcaacattctcaagcgggtggcaagcgatattcatgaagaagtggagacttataacaaaatgcttgaccgaatggggaacgatatggat

SEQ ID NO: 13665 - DNA, 114 bp, Zea mays
  Clone ID: LIB3159-002-Q1-K1-H5
ggcaggcgtgtggatcgttctcggttggtggacaggtccgggacatggacataatcaatctgcgagaggacaaaatcctggatgattagtagggttcacagtatggataattcg

SEQ ID NO: 13666 - DNA, 383 bp, Zea mays
  unsure (1)..(383): unsure at all n locations; Clone ID: LIB3159-002-Q1-K1-H6
ggaagcatttggttctttgcatggaaggaacatatacgatggttgctgccagctagatgttcaatattcaaatctcagtgaactgcaagtccattacaacaacgaccgatctagagatttcacaaatccatcattacctacagaacaacgtcctagggcctctcagcaagcttatcctgatccagctaatctctatgccttccaacaagctggagcttcatatgcacagatggngagggctgcaatgattgctgccgcatttggtggaactttacctcatggagtgactggtaccaatgaacggtgcacactcatagtcagtaatctgaataatgataaaatggatgaggataagctcttcaatctgttttccttgtacggaa

SEQ ID NO: 13667 - DNA, 425 bp, Zea mays
  unsure (1)..(425): unsure at all n locations; Clone ID: LIB3159-002-Q1-K1-H7
cggacgcgtgggtgcctatctatctagcgagagagagagaggaaagctagctagctagcatggagtgcggcagcaagaaggcagcaggcggtgtgttggcgctgctgcttctccagctggtgttagctccgacgacggcgacggcccgcctcctgcaggcggatacctccaccgtggttggcctggacatcatcgcgagggagtttggccatccagtgagaggcatcctctgtggtgaaacctgtgtcttcctaccatgctatacggcagccatgggttgccaatgcatnngccaaatctgcatgatgtgatatctggactagcgctatttgtaatttgtgttgggagaaacacaaggacggtacggtggtgttcaacttattgcatgtgtatggtgatctaataagtaaagtataataaaaagg

SEQ ID NO: 13668 - DNA, 199 bp, Zea mays
  Clone ID: LIB3159-002-Q1-K1-H8
cggacgcgtgggccgccgcattccaaacagcccgacgagctagcagagcggggggcaggtccctcctcaaggaacatggcccgcatgcagaagttggcagtggcgacggcggccgtggtggccttggtgctgctggcggcggcggcgacctcggaggcggccatcagctgcgggcaggtggcgtcggccatcgcgccct

SEQ ID NO: 13669 - DNA, 397 bp, Zea mays
  Clone ID: LIB3159-002-Q1-K1-C6
atggatctgaatggaggttcaagcacatatacaggggccaaccccgtcggcaccttctgactactggatggagcacgtttgtcacatcaaagaagctgattgctggtgacgcgtttgtctacctgaggagcgagaccggacagcagcgtgtgggagtgaggcgcctcgtgcagaagcaaagcacaatgccagcatctgttatatcaagccaaagcatgcatcttggggtgcttgcaagtgcatcacacgctattaggactcattccattttcctagtgtattatagaccaaggttaagccaaagccaatacatcgtcaggctgaacaagtccctggaatctagaaaaattggattcaatggtggcatgaggtttaagatgagttttgaagggaatga

SEQ ID NO: 13670 - DNA, 233 bp, Zea mays
  Clone ID: LIB3159-001-Q1-K1-A10
ctcctatttgcaacctccaccaccctacaacatgcccctacgcttttcacaacaccaccccccacttaacaaactatgtccattagtatacccccttcctaactacctacttgaatcattcagcagcaatgatatactcataactacccacgcatcaacatccctgccatcatcagtgataccaatgacctgaatgaacaattaaactgaaaaaaaccaaaaaagtccattcc

SEQ ID NO: 13671 - DNA, 328 bp, Zea mays
  unsure (1)..(328): unsure at all n locations; Clone ID: LIB3159-001-Q1-K1-A11
gacccacacgtccgcacaccaagcgaagcgcactatcaacaacctatcaacaatggctaccaagatattanccctgcttgcgcgtcttgcccttttagtgagcgcaacaaatgcgttcattattccacagtgctcacttgctcctagtgccattattccacagttcctcccaccagttacttcaatgggcttcgaacatccagccgtgcaagcctacaggctacaactagcgcttgcggcgagcgtcttacaacaaccaattgtccaattgcaacaacaatccttgtcacatctaaacctacataccatctcaacgcaacagcaacaa

SEQ ID NO: 13672 - DNA, 301 bp, Zea mays
  unsure (1)..(301): unsure at all n locations; Clone ID: LIB3159-001-Q1-K1-A12
cgggncgacccacacgggcgaggccatatcttcagcaataaacccaaaacagtcacatctctcgtcttttccacactcacaggaggcactgactgacttctaagtgcagccttcaataaccgaatgcattcccctacactgtttgcagaggggtgccccacttaaaaaactatatgctttaatataaaccctggctacctagatagatgaaacatttaacggggatcattgaataataatgtgtcacacattaccattggtttaagattcacactgagcaatgacacttaatgaacaattg

SEQ ID NO: 13673 - DNA, 228 bp, Zea mays
  Clone ID: LIB3159-001-Q1-K1-A9
acccacgcgtccggagcattcataatcacaccaatcgaagcgcactaacatcaacctaacaacaatttctaccaagatattggccctccttgcgcttcttgctctttttgcaagcgcaacaaatgcgtacattattccataattctcacttgcttttacttccattatttcacagtttctaacaccacatactttaacggccttcgaacacacagctgttcaagccta

SEQ ID NO: 13674 - DNA, 278 bp, Zea mays
  Clone ID: LIB3159-001-Q1-K1-B10
ttttacccacacagtttgggaaacaggaaagccttcttgcaacaacaacaatttctaccattctacccacaaaattgtgcaaacaatttttccttcttacaacaacaacaattgttgccatttaaccaacattctttgaccaatcctaccaccttatttcaaccgcccaccatttgtggtgccatcttctagatttttatgatttatactgtaataataaagttctcatgcttatatgtgcgacctctcactaataaagtattagagatctatttttt

SEQ ID NO: 13675 - DNA, 322 bp, Zea mays
  Clone ID: LIB3159-001-Q1-K1-B12
caatttcacccaaaaaaccaaactggggtaatctgcgaattttaaaagcaaacttccctaccttaaccattaacccacatatttcacaaactctataacctacctacttctatacatacctctcaccatcttttactataatgattcaaaacccaatccaccaaccctacatcatccaacattcaatctcaacattcatattaccattattaccctatttccttcaacaaccttcaaccctattacttcatttacctttacttcattattattcacatatcattatttcacaacaactacaacaactttttctatcaaacct

SEQ ID NO: 13676 - DNA, 301 bp, Zea mays
  Clone ID: LIB3159-001-Q1-K1-B9
cgcgtccgacaccaatctattctcactatcaacaaccttacaacaatggctaccaagatattatccctgcttgcgcgggttgcccttttagtgagcgcaccatattctttcattattccacagtgctcacttgctcctagtgccattattccacagttcctcccaccagttacttcaatgggcttctaacattcagccgtgcaagcctacaggctacaactagcgcttgcggcgtgcgttttacaacaaccaattgcccaattgcaacaacattccttggcacatctaaacctacaaacca

SEQ ID NO: 13677 - DNA, 373 bp, Zea mays
  unsure (1)..(373): unsure at all n locations; Clone ID: LIB3159-001-Q1-K1-C10
gacccaancgancggcaactaacaacatacaaaacacaatatttttccaacaatttcaaccaaaatatttatctggcttatacgccatagtctaatatcaaccttctctaccccaaccatttttctacaattctcacaatctcctataacttcccttcttcccccatacctttcaccanctatttcattaattatttaaaacccatatttttaaccctacatcatccaacaatctatctcaacattcatattaccattattacctttatatctccaacaaccttcatccctattacaacatttacctttattccattttttttcacaaaactattatctcaacaactacaacaactttttactaacaaacctt

SEQ ID NO: 13678 - DNA, 53 bp, Zea mays
  unsure (1)..(53): unsure at all n locations; Clone ID: LIB3159-001-Q1-K1-C11
gacccacgcggccgaagaaacacatccagaggacatcnacaggggaattaatg

SEQ ID NO: 13679 - DNA, 258 bp, Zea mays
  Clone ID: LIB3159-001-Q1-K1-C9
gacccacacgtccgaatactcaactatgcaatactacataatacattaggccattcaaccaaacatcttacattggtaaccaggaaccattcaacaaccatatcctctatctctacacacatccttataacaccacaatattcaatcaatactcacacaacaccttcaacaacataatctaccaacaatcaatcaaatagttacagctaacctttctaaatacctccatcaacaacacatattttccattcaatcaac

SEQ ID NO: 13680 - DNA, 211 bp, Zea mays
  Clone ID: LIB3159-001-Q1-K1-D9
aagaaatccatcgagaggccgtcgacaggggaattaatggcgtcgtcgtctaacagcagccggcgccgggtcatcctcgcagccgccgacctgctctccgtgctcgcggctgccagcgccagcgccgggacctcctgcgtgccggggtgggccatcccgcacaacccgctcccgagctgccgctggtacgtgaccagccggacctgcggca

SEQ ID NO: 13681 - DNA, 235 bp, Zea mays
  Clone ID: LIB3159-001-Q1-K1-E11
acccacgcgtccggcgcagaataacccgatcgacaccacgagggtgttgctcgttgccctcgctctcctggctggcgctgtgggcgccacctccacgcatacaagctgcggctgcggctgccagccaccgccgtctgttcatataccgccgccggtgcatctgccacctccggttcacctgccacctccggtgcatataccaccgtcggtccacctgccgtcgccggtgcacctg

SEQ ID NO: 13682 - DNA, 398 bp, Zea mays
  Clone ID: LIB3159-001-Q1-K1-E12
ggcgccgtggtgttggcgtagaacttcctgttccccagcttacgtgctcccaagcatcccgggcctaccgcctgcatggctcccgctgcgactgttcctgatgcggccgagcctatcggtgactcaggcaaggtagtaacacgggaaattgtggtgaagcgactgaaaggctgcagaaaggttacatgccaacttctcggtgttgcttttgaggagaaaattcctgaggagcttcagaaacatgccaccgttagaccctccgtggtagagctgctactggaaatatccagatattgtgatctctacctaatggagactgtaattgactataagagcgaggaaaatgctctcatggccctggagacctctggacttttcagaacttgtggcctgattaa

SEQ ID NO: 13683 - DNA, 288 bp, Zea mays
  Clone ID: LIB3159-001-Q1-K1-E9
acccacacgtccggcgacatacaaaatggtcctacagacctttctgcattatcagccgcaccacgagctcgcggggcttatggcggcctatgtagcgcatcagcttacggcgatttgcggcctgcagctgcagcattcatattcctacccttgcaacgcatatgccggcgttgtatactactgacgaaactatgtacttttgcaataatgtaatggagccgctgactagctacctacctctctagcttactcatttagcggcgattaaaaacttagtgtcacccatca

SEQ ID NO: 13684 - DNA, 226 bp, Zea mays
  Clone ID: LIB3159-001-Q1-K1-F10
atcgcgcataatttctcgtaaaaaatcctgctccccagcatacctgctcccaatcttcccggacctatcgctgcattttctcccccttctactcttccttattcagccaatcctatctttgactcatacaatgtactaacactttaaattattattaatctactgaaatgcttcataaattttacatgccaacttctctttaatgtttattattataaaattcttt

SEQ ID NO: 13685 - DNA, 320 bp, Zea mays
  unsure (1)..(320): unsure at all n locations; Clone ID: LIB3159-001-Q1-K1-F11
acccacacgtccggagcattcanaaacacaccacaccaagctgcctatcatctacttaacaacaatggctaccgggatattagccctccttgcgcttcttgcccttttccttatcgcaacacataccatcattattccacaatgcacacttgctcctagtgccattataccacaactcctccgaccacttactttaatgttctttgaacacctaactttgcaagcctacaggctacaacaaacactagccgttagcgtcttacatcaaccaattcaccaattgcaacatcaatccttggctcttttaaccttacaaacca

SEQ ID NO: 13686 - DNA, 355 bp, Zea mays
  Clone ID: LIB3159-001-Q1-K1-F12
gacccacgcggccgtgtgagcatgcttcttatggataatggctgtaggcaccatagtctgtgcttcactcttgacgtgaattggtcatgtgaacaggttgatgagccttataatcagctgaccagaaaggatgtacctgacaccggaataaactacagagaagataaagaggtcttcgagatcagcgcgaagggtgcttttatttttattatagtagcttcagtttttctcctccatctgttctacttcatgtcatcttggttcgtttgggtgctaattgtactattctgcatttggggtattgaaggtatgcatgcttgcttggtcacgcttttaactatgatttttaaagact

SEQ ID NO: 13687 - DNA, 187 bp, Zea mays
  Clone ID: LIB3159-001-Q1-K1-F9
gacccacacgtccggcgcataataacacaatccacaccatgatgttttttctcgtttccctaacatctccttactcgatatttgacgccatctccactcatacaatctttctcatcgcaccaacagccacacactatttttcatataccaccgcctcttcatctcccaattccacatcacctcccac

SEQ ID NO: 13688 - DNA, 300 bp, Zea mays
  Clone ID: LIB3159-001-Q1-K1-G10
cggacgcatgctatctaccataaaattttgagcattcaaaaacacacaacttgaatctgcacgtgcaactgggccaacaacaacaggctaccaaaacattatacctccttgccctcctttgccggacctgacacgcgaataaactactcattatatcacaaggcctactagatcatcacgacaggatctcacattttcattatagaagctcaagaattgctactccacaccctatacttcatgtcatcttgcttcaacaggctcctaattggactattctacaacaaccgtattgacgat

SEQ ID NO: 13689 - DNA, 368 bp, Zea mays
  Clone ID: LIB3159-001-Q1-K1-G12
cggacgcgtgggatcgcccataatattttgagcattcaaaaacacacaaagggaagtgcacgagcaactgcctaacaacaatggctaccaagatattaaccctccttgcgctcctttccctttcagtgagcgcaacaactgcattcattattccacaatgctcacttgctcctaatgccattattccacagttcctcccatcagttacatcaatgggcatcgaacaccctattgtgcaagcctataggctacaacaagcgcttgcggcgagcgtcttacaacaaccgtttgcccaattacaacaacaatccttggcacatctaaccatacataccatcgcaacacaactagagcaacagtttgtgccc

SEQ ID NO: 13690 - DNA, 179 bp, Zea mays
  Clone ID: LIB3159-001-Q1-K1-G8
acaaaaatccattacccacaaaataacaacatttcacacccacacatcctaatagacgaaaagaatcatctcaatctccattcattcctatcacttcatccctccctatctactaactatcccatacattttactaattttactcaaacaaccaatcaattcaacttataaaaattcta

SEQ ID NO: 13691 - DNA, 429 bp, Zea mays
  Clone ID: LIB3159-001-Q1-K1-H10
gcgaagcacaatcgcaacaacctaaccacaatttctacctacaaactacaacctctaccaggacattctgctttctttaacaactcatacgcctaccttattccacaaatcctactaacttctaataccattacttctttcctattaccactaactaacacaatctactttcaataaaaacccattccttcttacattcaacatccaacactcaattacagcttacaacatacctttataacctcttttcctccacaattcatcactcatataaacttacaaaccatctcatcatatattctaccacaactttttccatcactaatccacctaactctttctaaccaatcctttctactttcatcaacaactactttcatccaacccacttgctcttgctaacttagctgcataccatcaacaacaact

SEQ ID NO: 13692 - DNA, 311 bp, Zea mays
  Clone ID: LIB3159-001-Q1-K1-H11
ttactttataaaacttatcaacaattgggttccatggattaatctcacttttacctctttccccatttcaaaacccaacacatactctcataaacccacaattcatacactctcttacatctattttaccacaaattcttatatccattaccataattagccttaaacaacttaatatcccaatctaccacctaaaataaaccctttccatcaacttctttcctccacccatttaaccatttccaccaccatcctttgccaattctaccatttcaaacatttccacacaaccccaacaacaatttcttaca

SEQ ID NO: 13693 - DNA, 428 bp, Zea mays
  Clone ID: LIB3159-001-Q1-K1-H12
gcgaagcgcactagcaacaacctaacaacaatggctaccaagatattagccctccttgcgcttcttgccgttttagtgagcgcaacaaatgcgttcattattccacagtgctcacttgctcctagtgccattattccacagttcctcccaccagttacttcaatgggcttcgaacatccagccgtgcaagcctacaggctacaactagcgcttgcggcgaccgtcttacaacaaccaattgcccaattgcaacaacaatccttggcacatctaaacctacaaaccatcgcaacgcaacagcaacaacagtttctgccatcactgagccacctagccgtggtgaaccctgtcgcctacttgcaacagcagctacttgcatccaacccacttgctctggcgaacgtagctgcataccagcaacaacaacg

SEQ ID NO: 13694 - DNA, 414 bp, Zea mays
  Clone ID: LIB3159-001-Q1-K1-H9
gacccacacgtttcggtttttacaatgacaaacacaccaaccaaaatttcctatcaacaatttatccaccatttgcgccaatgtattattccaacttgcgcttcttgcaccatttttcaccacaacaaatacgctcattaatccacaacttcttactcccttctatttacactataccacaattccttctaacaactcctttaattgacctttaacaactcaacatgcaaacccacatggtataacaaactctttaccctagcgtcttacaacaaccaaataaccaatttctacaacaactcttgtgccattttaccctacaaaccattgggcacaaaacaacaaaattttatcaaaattttctatctatttgaacctttttcttttttaaacaattcttatataacccttttt

SEQ ID NO: 13695 - DNA, 376 bp, Zea mays
  unsure (1)..(376): unsure at all n locations; Clone ID: LIB3159-002-Q1-K1-A11
gtgaaggccaattacaattaagcgcanaaagtttcatgacaagctatattggctctgtttgggtgaggcttaggggtgactaaagtttatttcctgtcacatcgaatgtttgaatatcgaatgtttaaatatcaattattagtattaaatataagcttattatatttaataaatctgtctcgtttttttatttaatactcataattgatatttaaacattcgatatcattacatagactaattctcttgttcgttcactcatgcgtgatggcactgagtattttacaccttactctttaaagtctttccgaatcctgggaagtgttggttagccaatcaatcctattgcatggagatggttctacaatactgtttg

SEQ ID NO: 13696 - DNA, 341 bp, Zea mays
  unsure (1)..(341): unsure at all n locations; Clone ID: LIB3159-002-Q1-K1-A2
aagaaagcgctgtgtggcgctacctgtccgtagtatggccgcgccgactgtctgtcgggtggcatggcatgatatacattctagttatcttgaaccaaaggcgactgtccgtagagttgcttgctcttgcttcancaggtgggaatggcgccgagcacttgggttcgcctgtctcagttaccagaagagcctaatcccatcgtctctcgtacgtcgctcggatgtccgcatcaacgaccagcgcggcagccagcatgcacaggcgcgccgagaatgatcagggggtgccgtctctatccttcattcagcgattcgctttctgaaaagaacatttgtcaaaa

SEQ ID NO: 13697 - DNA, 282 bp, Zea mays
  Clone ID: LIB3159-002-Q1-K1-A3
ccctcctcagcctcatcctatccaagaacgcagaaccgagacccaccaactcgcagcaggccagcggacatggccgcgcccgcaacgagctccctgctgagcacgctgctgcagctaccgctcgctccggtctcggggaagagctcgccgccgtccgtggtgcacgtggcgcgccgggcgccgacagcggtggtggcggacaaggggttcaatgcgcacatactgggggacgagaacgagggggaggagtccatctttcgcacgttccggcgggaagtgatg

SEQ ID NO: 13698 - DNA, 355 bp, Zea mays
  Clone ID: LIB3159-002-Q1-K1-A4
gggagaagccgccgccgcagcaatcacagtagcccggagaaagcccaggtccgacaagatgcagatcttcgtgaagacgctgacagggaagaccatcaccctcgaggtcgagagcagcgacaccatctacaatgtcaaggccaagatccaggacaaggaagggatcccgccggaccagcagcggctgatctttgccgggaagcatctggaggatggccgcacccttgcggactataacatccaaaaggagtctacgcttcacctcgtgcttaggctccgcggtggcatcattgagccctcgctgcaggcgctcgctcgcaagtacaaccaggacaagatgatctgccgaaaatgc

SEQ ID NO: 13699 - DNA, 354 bp, Zea mays
  Clone ID: LIB3159-002-Q1-K1-A5
cactcctgaattcttcaattgtttcttcaaaagtagatgctagcaattctgtcttagagaaccctgttgtgggaagtgagatgtggataagtaaaacgaaagattctaagcctgccaagtctggacgtctatctcacgaagaaaagaagcttgggaagtctaatgatgaaaagaagacaaaacctcggaagtcaatggaatttcataacatcaagattggcaaggttgaacttcttgttacatacgagggatcaaggcttgctattaatgacctaaggttgcttatggatactttccacaaggcagaatttactggtacatggaggcgactattctctaaaatcaaaaaacata

SEQ ID NO: 13700 - DNA, 352 bp, Zea mays
  Clone ID: LIB3159-002-Q1-K1-A6
cgacgactgggcaactaccgctgcccaaggtcaggtgctcgagtatccgtcgacccctgcgctaggccattcccgttgacagcaagcatcagttcaataattccaataaggatctcaagacctacagctggggaatgttatttgacaatggtttcaagttgaccaaacagagtggatacagtcatgctcaaagttggcaagctgtgtcaacaagcatgccccatctgctactcgcttcatgggcatgcaacaaagccttggtattcagccgacgcagcttgggaaggatgcacctgcagcaggagttgcacgtagagttagtgcttaatgaaagaagatcgagggtgagtct

SEQ ID NO: 13701 - DNA, 155 bp, Zea mays
  Clone ID: LIB3159-002-Q1-K1-A7
ttcagatccgcataaaacctcgctccccttttggtttgtgccacgtgacaggatctgtgccgcgatggcgacgtcgaacaccgctctgatggaggacggctgcggctacctgagaagcaccatcaagaagtggaacatgatctaccctgtctacc

SEQ ID NO: 13702 - DNA, 367 bp, Zea mays
  unsure (1)..(367): unsure at all n locations; Clone ID: LIB3159-002-Q1-K1-A8
accgaattccctgcgattcctctcccctcgcctcctcgtctccccctaggggatcgtcggagaggaatcgcaaagagggccgtctcatccgagttaaggaagccatggagcacaaggaggctgggtgccaggcccccgagggacccatcctctgcatcaataactgtggcttcttcggcagcgcggcgaccatgaacatgtgctccaagtgccacaaggagatgataacgaagcaggatcaggccaagctggctgcctnctctatcgacagcatcgtgaacggcagcgacgccgtcatggagcccgttgttgctggcaacaacacgggaataagctgttccccaagttgagttgcaaacaatgaacg

SEQ ID NO: 13703 - DNA, 293 bp, Zea mays
  Clone ID: LIB3159-002-Q1-K1-A9
gggtcggcccacgccttccgttaaggcccatttccatttaacgcaaaaaggttcattacaagctatatggcctctctttgggtgaggcttaagggttaccaaagcttatttcttgttacattgaatgtttgaatatccaatgtttaaatatcaatttttagtattaaatataagcttattatatttaataaatctgcctcgtttttttatttaatactcattattgatatttaaacattcgaaatcattacataaactaattttcttgttccttcactcatgcgtgattgcac

SEQ ID NO: 13704 - DNA, 205 bp, Zea mays
  Clone ID: LIB3159-002-Q1-K1-B1
cacacgttcacggtagcgagagcttatcgtcttcggctgtgaagatggtgtcgctgaagctgcaggggcggctcgccgctagcgtcctcaagtgtgggaaaggcaaagtctggcttgaccccaatgaactcagcgagatctccatggctaactcccgccagaacattctgaagttggttaaggatgggtttatcatcaagaagcc

SEQ ID NO: 13705 - DNA, 228 bp, Zea mays
  Clone ID: LIB3159-002-Q1-K1-B3
tggttctgcagatgaggggcactatccttcctgggcacaagtgggaggtcatggtggatttgttggtctacagggacccagaggaagcaaaggagcaggacgaggaagctgctgttgcccctgagtttgccgcaatcactgattaccaaggagctgatcagtggggtggtgaccagtggacctctgatgtgactgcgccgcctgttgctcctactggtgctgattggg

SEQ ID NO: 13706 - DNA, 305 bp, Zea mays
  Clone ID: LIB3159-002-Q1-K1-B4
atattgcaacagggcggcacgttaaatatgatcagcgttcagatgttttcagttcatccacgagaggatcactaggccgtggtcaagcatttgatgcgctaaatcaagggcctgatcagggagtcgcctcccccaagatctgtggagaggaaatgcagctcaagggcttcagcgacagcgacatggtaggctgttagagtatatttactgtgttgccactattgtaatgggcttggcccacctaactcagaccatatatatatatatatcacccaaccccctgttagggttagggttttgcattc

SEQ ID NO: 13707 - DNA, 272 bp, Zea mays
  Clone ID: LIB3159-002-Q1-K1-B5
gcgaggaccgatgagattggtgttccatttgccgtgacagtggattcggcaacaaacgtgactatccgagagagggacagcaaggagcagatccgtgtggacataaacgaggtggcgtccgtggtgaagcagctgacagaaggacaaagcacctgggcagatgtttctgcaaagtatcctgcccatgttggaccccaaggtgaccaggagtgaaaaatcctgccacccttatgtctagccatggaccgagaaggagccaggatggatttcat

SEQ ID NO: 13708 - DNA, 432 bp, Zea mays
  Clone ID: LIB3159-002-Q1-K1-B6
cggacgcgtgggcgacgccacaaccacacgttcacggtagcgagagcttatcgtcgtcggcggtgaagatggtgtcgctgaagctgcagaagcggctcgccgctagcgtcctcaagtgtgggaaaggcaaagtctggcttgaccccaatgaagtcagcgagatctccatggctaactcccgccagaacatccggaagttggttaaggatgggtttatcatcaggaagcctcagaaggttcactctaggtcccgtgcaagaagggcacatgaggccaagcagaagggaaggcactctggatacggcaagcgcaggggtaccagggaggctaggctccccaccaagattctgtggatgaggaggatgcgtgttctgaggcgcctgctccgcaagtaccgtgaggccaagaagatcgacaagcacatgtatcatg

SEQ ID NO: 13709 - DNA, 165 bp, Zea mays
  unsure (1)..(165): unsure at all n locations; Clone ID: LIB3159-002-Q1-K1-B8
cggacaagccncncaacagcaagggagnccaccaagcccnccgcgccgcnggggcccgggaggcncgcgcccnccncgnccccgcccgcncncgcgngggagaaggcggaaccggagngccacncgngcgagnccggcncgccacccacgaaccggcggcgcccc

SEQ ID NO: 13710 - DNA, 108 bp, Zea mays
  Clone ID: LIB3159-002-Q1-K1-C1
gggggctcctgatggtctacccccctgttcatttgatgccattccataccaagggctatgggtgccggtcaaagcacctcaaggacgtgaagaacaatcatattaaga

SEQ ID NO: 13711 - DNA, 294 bp, Zea mays
  Clone ID: LIB3159-002-Q1-K1-C2
agaagatggtgctgcggcggaaggtaaaggtaccgatgtggagatgaaagatgctgaaaatgctgaggacgagaagaaagatgtcccaagtgcagagaagactgaggaagttgacgataagaaagatgctgaaaatgtggagatgaaagatgctgcatagaatactgaggatgttgaagataataaataggaagcccctactgtagatgcagcagagaatactgtggaaggtgatgataagaaagaggagccccctgcagagaagactgatgagaaagaggaagccccatctgt

SEQ ID NO: 13712 - DNA, 422 bp, Zea mays
  unsure (1)..(422): unsure at all n locations; Clone ID: LIB3159-002-Q1-K1-C3
ccagccgccgtcgtcgccgcctaaggagaagagggttcggccgtctccttgccccgatggcgtgggagaagaagcagtccaacccgatgcgggagatcaaggtgcagaagctggtcctcaacatatccgtangggagagcggctaccgccttacccgcgccgccaaggtgctggagcagctcagcggccagacccccgtcttcttcaaggcgaggtacacggtgcgctcgttcggcatccggcgtaacgagaagatcgcctgctacgtcacggtcaggggcgacaaggccatgcagctgcttgagagcggcctcaaggtcaaggagtacgagctggtcaggaggaacttcagcgacaccggctgctttgggttcggcatccaggagcacatcgaccttggtatgatccatcaacaggcattt

SEQ ID NO: 13713 - DNA, 207 bp, Zea mays
  unsure (1)..(207): unsure at all n locations; Clone ID: LIB3159-002-Q1-K1-C4
gcnnccgngcgangccgaacatacngangcnccgcccngcnganggcaacgagaccgccggagcagacaaaggcgcggacgncaacaggaagaggccgaccagccacgcgcncnccaggcaaaagcgcccacaccngccgggcaccncgaacgagggcgaggagaaggggcgggacaccancaccgacaacncgacgggcaacaagc

SEQ ID NO: 13714 - DNA, 185 bp, Zea mays
  Clone ID: LIB3159-002-Q1-K1-C5
gaccgccggaatccggtcgacccactcgtgcggaatgtcgcttgatctccgtccaaattggaatggtaaatcagcctcagcagaatgttacctacatttgcttggatcgtataattattgtagactaagattattagttatggccaataacctttgcttactagccctttcacgtgatgccgatg

SEQ ID NO: 13715 - DNA, 284 bp, Zea mays
  Clone ID: LIB3159-003-Q1-K1-A12
gcagcctggcatcgcgattggccgcctttgcgagaaatgtgatggcaagtgtgttgggtgcgactcgtacgtgcgcccatgtacgcttgtccgggtctgcgacgagtgcaattatggttcgttccagggaaggtgtgtgatctgtggaggagtcgggatctaagacgcttactactgcaaggagtgcacccagcatgagaaggaccgggacggttgccccaagatcgtgaatctcggaagcgccaagacggatctcttttatgagcgcaagaagtatggtttta

SEQ ID NO: 13716 - DNA, 406 bp, Zea mays
  Clone ID: LIB3159-003-Q1-K1-A3
ctgagctgaagaggaggaggaggaggaggagaagcagcagcgcagccggaggagggagagcgaagatgcgccgcgtcgcgctgttgctcgtcgccgccgtgtgcgcgctggcggcgccggctgccgcggtcgtcactgacggtcttctcccgaacggcaacttcgaggatggcccgcccaagtcggcgctggtgaacggcacggtggtgtcgggcgcccacgccatcccgcggtgggagacgtccggcttcgtggagtacatcgagtcggggcacaagcagggggacatgctgctggtggtgccgcatggcgcgcacgcggtgcggctgggcaacgaggcgtcgatccggcagcgcctggccgtggcgcgcggcgcctactacgccatcacgttcagcgcggcgcg

SEQ ID NO: 13717 - DNA, 382 bp, Zea mays
  Clone ID: LIB3159-003-Q1-K1-A4
gctggaaaaagggcctaagggagtccatttaaatcttccggctttggcatgcatgactcatctcccagcaaaagagaaagttacagtgaccatggtggttctgaatccgttttttggtgacaagtttgctgatgaaacttcctggaactttgatgatcaagatactgactctgtttggggttctactgtactgaacactgaggccgaccaacgcggtggcacgcataactctttctttgggtcggatgcaggctcaccaagtggcgctagtgtatttggaaagaataggaaattattcttcgacgattttgttccaagttctcctgcatacacatctgggtttttttccaaatttggcgaaagccgtgacaatagcttcttt

SEQ ID NO: 13718 - DNA, 428 bp, Zea mays
  unsure (1)..(428): unsure at all n locations; Clone ID: LIB3159-003-Q1-K1-A5
ggaagtactactccctgaatgcccaatgtcacgggcgaatcataatgcttttaatttgcttgcaaaatatagcaagagccatcttgttttcaatgatgacatccagggcacagcatcagtggtccttgcaggtttgttagcagcactcaaggtggttggtaggaccttggcagagcacacttatttattccttggtgctggggaggctggaactggtattgcagaactcattgctcttgagatttcaaaacagacgtcggctccaattgaagagtgccgcaagaagatttggttggtggactcaaagggtttgattgttgactctcgtaaaaactccgttcagtcattcaaaaaaccttgtgcacatgagcatgagcnccttgacaaccttgtacgatgctgttcagtccatcaaacctacagttctg

SEQ ID NO: 13719 - DNA, 261 bp, Zea mays
  Clone ID: LIB3159-003-Q1-K1-A6
ggaagtactactctctgaatgcccaatgtcacggtcgaatcataatgcttttaatttgcgtgcatattatagcaggagccattttgttttcaatgattacatccatagcacatcatttgtggtccttgcatgtttgttagcttcactcattgaggttggtatgaccttggcaaatctcacttatttattccttggtgctgaagatgctggaacatgtttttcataactcaattcttcttaaaatttcaaaacattactttt

SEQ ID NO: 13720 - DNA, 441 bp, Zea mays
  Clone ID: LIB3159-003-Q1-K1-A9
gccgggccggaatttccccggcgacgccacacgcgcggcggtaagctggccagccaccagggctccaccacctctgttcccgctcccgcctctcctggggctcctcgtcatcgtgcctctgttccccaccgccgcgcggacggccacgacgctgccgctgtaccgccacctaccgcacgtagccgaggccgtggcatcgcaccaccacccgctgtcccgcctggccgccgcgtcgctggcccgcgcgttgcacctcaagcgccgggaccccaaccaccacagccagaaaggatcaggcggccacccgtcagtaccagccaccgtcgcgctgtacccgcactcctacggcggctacgccttcacggcgtcgctcgggacgccgccggagccgctccccgtgctgcttgacaccggcaggcaccttacgtgggggccatgcac

SEQ ID NO: 13721 - DNA, 332 bp, Zea mays
  Clone ID: LIB3159-003-Q1-K1-B10
caaatggcaatgattcctgggagatccatgaagagatgctaaaaaattcataagatgggtgcatggagattgggctaccataccaagttgtttccattgtctccggtgctcttaacgatgctgctgctaagaaatacgatttggaagcatggttccctgcatcaaagaccttccgagagttagtatcctgttcaaattgcactgactttcagtcaaggagacttggaattgggtatggccagaaaaaggtaaaagaatgacgagcagtccaagcagttttgttcatatgctgaactctaccttgactgccactgagaggaccctctgtttca

SEQ ID NO: 13722 - DNA, 397 bp, Zea mays
  Clone ID: LIB3159-003-Q1-K1-B12
ctcccgcccaccgtcgtcgtcgcccaaccgcagtaaggaggaaggagcaggaatatgccggctgtgcacgggctgcggtctcggacccactacctgttcgcgcggcccttccgcatgaaggggtacatcctactcaccacgtacctgcgcacctacaagatcggcgactacgtctacgtcaaggttaacagcgccgtgcacaagggcatgccgcacaagttctaccacggccgcaccgggagcgtctggaacgtcaccaagcgcgccatcgtcgtcgagatcaacaagcaggtttatggccgcatcatcaggaagcggatccatgtccgcgttgagcatgtgcaagtcctaccattgcaacggttgtatttcatgttgttgaaagccaatattgacc

SEQ ID NO: 13723 - DNA, 330 bp, Zea mays
  Clone ID: LIB3159-003-Q1-K1-B2
agctgcccatgaacgtgggcgacgcgcactacgacccgctcttcccgttcggcttcggactcaccaccaagggcacgaagtgagtgagtgtgaggcgctctgatgggatgtggcctgtgagtgagctgtgtattcgtgggcgggcgtgaggctctttggctttcgaattggttgggggtgacgggcggtgagtcgtgtacgccgtacacattgcgcattgtacgttggtttgggatgtttgcgtctgggtaataacagtgatgcattcttgagatggttgctgttagtgtgggttgtttggaatgaacaataatatcatggccgtttcat

SEQ ID NO: 13724 - DNA, 257 bp, Zea mays
  Clone ID: LIB3159-003-Q1-K1-B3
catcgacgacatcatgctcgacctcgcagccaaggacgggatcaactggttggactacaggaagcatctcatgaagagcgagcaatggaacgtcgaagtctactgatgatgatccttcattgtattgttcagctcaagcaatctggtggagatgagtttgcattgcattgttcgtagtattgcggagatcaatctaatcgtttggctcgtcgtcattctatcgatgtacatacattatatatgatgaaagacatata

SEQ ID NO: 13725 - DNA, 407 bp, Zea mays
  Clone ID: LIB3159-003-Q1-K1-B8
cttcaaaatgttcttgggcgtgactgcaaccgtgaccaattgggatgctgagggtacaaggttgcagccttgtcctggaagacaaccctcttgttgatttcgttgagctccctgacacttgccaaggccttcagtattgcaatttgttaagtggagttattaggggggcattggaaatggtgtctatgaaggcggaggtgacatgggtgcgtgacatgcttcgcggggacgatgcctatgagatgcgggtgaagcttatcaagcaagtcccggaggaatacccctacaaggatgatgactagttctactttagtgcaagattgcttgtttggattttgacatcgttttcgtcgatggtccgtaattctgctataacctgatatcatacgaagaaagctgcgtctgtt

SEQ ID NO: 13726 - DNA, 224 bp, Zea mays
  Clone ID: LIB3159-003-Q1-K1-B9
cttcataagttcttgtgcttgactgcaaccgtgaccaattgggatgctgagggtacaaggggcatccttgtcctggaagacaaccctcttgttgatttcgttgagctccctgacacttgccaaggccttcagtattgcaattttgttaagtggagttattaggggggcattggaaatggtgtctattaacgcagtattttcatgttttcattgacattgctctc

SEQ ID NO: 13727 - DNA, 420 bp, Zea mays
  Clone ID: LIB3159-003-Q1-K1-D10
cgcacaggcctctcgccctccgcgcggctccacaggagagcaaaaatggcgaccctcgggcatggtctccgtccccatcgcaccctcctccttgtccctttccacccggggccgcagctcctccgcatccttccccgctaagaagggaggaatcggtcacggtggcttgcggatcgagtgcatccgtattggtggtgttgagattccaaaccacaagagggtggagtactcgctgcagtacatacatggcattggacgctcacgctcacgccagatcctcctggacctcaatttcgataacaagatcaccaaggacctctccgaggaggaagtcatcaccctcctgaaggaggttgggcagtacttgattggaggagaccttaaacgttttacccgggtggcaattgaaaggcttaaaga

SEQ ID NO: 13728 - DNA, 354 bp, Zea mays
  Clone ID: LIB3159-003-Q1-K1-D11
acgctttctacgctctccgtctccttgaatcgactggaatcgtcgtggtccctggatgtggatttggtcaagttcctggaacatggcacatcatatgcacgatcctgccgcaggaagacaagatccccgcggtgatcagccgcttcagggctttccatgaggcgttcttggccgaataccgcgactaaactgttacgctgtgtgtgagttaagttggaggttcagtagaactgtagaagagctcagtgacagcgcatatagaggcagtgttagaaaggcttatgtccttcttcacaggagcaacagttgtcttgtctcatcaaggagaaataaaaatttttagtttacaacttc

SEQ ID NO: 13729 - DNA, 276 bp, Zea mays
  unsure (1)..(276): unsure at all n locations; Clone ID: LIB3159-003-Q1-K1-D4
aacccgccaaccccagccgaaagccgggcggaggaagagggacggagggcagcacggccgccgccggggcagccgcagcaaggagctgaggacggccgccggcgacgacaactccgacgccgacgcgggcgnggaaacggcggcggcggcggcgaggaagccgacgaacgcgncccggagcaccggcaagagccggcgggcccggngcgcgggccgccacgcgcacccgggctccaaggcgcgcgacaaggcccaaggcgcgcgcaagctgcgcgc

SEQ ID NO: 13730 - DNA, 162 bp, Zea mays
  Clone ID: LIB3159-003-Q1-K1-D6
ggacaccatctatgcttcaaatgattgatcaactttcggactcaactggaaatgccttgtcaccaatccccttattgtttggttttgcagtatttgctggagcatttgaagcatagttggtgtccttactattggcaggcaccactggctgaccatagcttc

SEQ ID NO: 13731 - DNA, 422 bp, Zea mays
  Clone ID: LIB3159-003-Q1-K1-E6
ccggatcctccgcctgtggggcgcgcccgacgccgtggcgcgctgcggcctctaccagggcgcctactccaactgctacgtcaacctggccatcttccagcctgacaccgggcgcgcccacgtcgctgccgtggtcggcggacccgcggagcgccttgtccacctcttctgcgtcgtccccaggcagcagctcgtccacgacgacctgctcttccactactccgaccaggacctcgccgacgacctagccagctccgaggagtcggtccgggacgcccggcgcggcgtgttcgacgacgcccagccgtggcggcgcaagatccagcgcctcctcccggcggacggcatcacgggcaagcacatcaggacaggggaggatgtgtcactgtccatgcgcatcgcagcgacgttccttctgatga

SEQ ID NO: 13732 - DNA, 280 bp, Zea mays
  Clone ID: LIB3159-003-Q1-K1-F7
ccggtccgaatcccgggcgcgcacccgtcccctgacgaaccacttccatggcggaccactcagggcgagcagatcgcggattgaggaggcctcagcctctcgaaaggaggcgacgctgcatcactaccaagggcttggaactggatgcgctcccttggcagaccccactgaagcagagctgaggacatgacaacgagttgatgctgatggaatgggacattgacttccagagtcctgacctgatggcaggaagatgaggacaccgcctcgaggaggagct

SEQ ID NO: 13733 - DNA, 293 bp, Zea mays
  unsure (1)..(293): unsure at all n locations; Clone ID: LIB3159-003-Q1-K1-G4
cggagacacangccaggangcagaggaagaannccaagaacggngangactaccgggcggggagccaggngactgaagctgaggcacaggcaggccnngaancnncaaancngaaagcaggcaaagacangacaaagagcaaagaagggacagggaaaancgccgncaaacgccgctgcccgcatgatanaggaaacactccaaacccttatgagcaagctatatctattattggaaggacactttcagcatttgatgaagattaatttgattccctgcttcggatttggtga

SEQ ID NO: 13734 - DNA, 429 bp, Zea mays
  Clone ID: LIB3159-003-Q1-K1-G5
agatacttggtggcagactgtaacctttggattcatgatcactcctttacctggtgctgggcctcataagccaggatcagcaacgtttcctttcttcggtgtgcatccagtcattgttgacgagaatggtcgggaaatggaaggagaatgcagtggatatctttgcataaagaaatcatggcctggggctttccggactctgtttggagataaagagagatttgagacgacatacttcaaaccatttgctggatattatttctcgggcgatggctgcagcagggataaagatggctaccactggctgactggaagaagtgatgaatgtatcaatgttagtggacaccggattgggacagcggaagttgagtctgctttgtttcacatccaaaatgtgcttatggtgctggtgttggtatttgatcaatg

SEQ ID NO: 13735 - DNA, 167 bp, Zea mays
  Clone ID: LIB3159-004-Q1-K1-A1
ctatgacaaaacattccgaagcttttgaatggtgaaggcagacattgtgggccgctgaaatggagggacatgtatggctgcacaagaccctatcaagggtgacaccaaaggctttagtgcataaattcgtggagattggaagcttttgagaacaaaaagcatgtttt

SEQ ID NO: 13736 - DNA, 180 bp, Zea mays
  Clone ID: LIB3159-004-Q1-K1-A10
ggggggggacgagggggggggggggggagacacagagaagggagggggggggagggggggggggggggggggggggggggggggaggggggaaagggggggggggggggggggggggggggggagaaaggggggggggggagggggaggggaggagaggaggggggggggggggggaggg

SEQ ID NO: 13737 - DNA, 351 bp, Zea mays
  Clone ID: LIB3159-004-Q1-K1-A12
cacacacacaccgcacctagccacctaccctgctgtcccccgtgccgtcgccgatggagtccttgggcgtgctgctgctccaccccttcaacgcgtacctggagcaggagctggaccgccgcttccgcctgtaccgcttctgggagacgccccgcgaggagttcctccgcgcgcacgcgggcgccgtgcgcgccgtcgtcggcaacgccagctacggcgccgacgccgcgctcatcgacgcgctcccggcgctcgagatcgttgcctccttctccgtcggcatcgaccgcgtcgacctcgccaagtgccgcgaccgcgggatccgggtcaccaacaccctccgacgttctt

SEQ ID NO: 13738 - DNA, 404 bp, Zea mays
  Clone ID: LIB3159-004-Q1-K1-A2
cgggcataatgctctccacttttttgtggttttacatgtgcctaaagcacactaaattttggggacgtttcactctggttttacaggcctcccgccaactctacctgtccggattcctaaacatgaggacgatgcagctgaaggaatccctctcaggtctgctgaaggcatcccgctcagatcaccgagggcaacggaatcgtttcgatcaacgctataatggttggtgatccttcttcaaaggccatgctcagccattctttcatttgatacacacctttgtagattgtattttaagattccaaaaggtaaaggcaccgctccccatgtaatttttttgagacaccggtgtagagtatcgggggaacttatgttattcatcttgaaatgcccagaatgggctt

SEQ ID NO: 13739 - DNA, 358 bp, Zea mays
  Clone ID: LIB3159-004-Q1-K1-A4
gcgcttacgtcactgagacagtccttgctgcctgctacaaggctctcaacgagcaccatgggctcctggagggtaccctcctgaagcccaacatggtgactcctggctccgactctaagaaggtgacacctgaggtgatcgcccagtacaccgtccgtaccctccagaggaccgtccctgctgctgtgcctgctgttgtcttcctctccggtggacagagcgaggaggaggccaccctgaatctcaatgccatgaacaagctcagcaccaagaagccatgggccctgtccttctccttcgggcgtgccctccaggcgagcacccttaaagcctgggctggcaaggtggagaacgtgga

SEQ ID NO: 13740 - DNA, 328 bp, Zea mays
  Clone ID: LIB3159-004-Q1-K1-A6
agcgagcacaccgacgcgcccgcgcctgttttcaccttcaagtccaacccacacagaggtgccgcgagctctgtcggtcgtagcatgctgattcaagcaccggccgatccagccggccagtttccttccataccgagctccatggagtgtcacgagagcagcagccaaggtccgtcgcagccggagctgttgagcatgccgggcgtggagagctcgggcctgcgttgtggggtgctggggcatgcgctgtacggtgtctgtgttccgaatgacgtagaagaaggctgggacctcgcgccgcctttccgcgtcgtctgatgggatgggg

SEQ ID NO: 13741 - DNA, 436 bp, Zea mays
  Clone ID: LIB3159-004-Q1-K1-B1
ccacgcgtccggtctcatgatagctggagcagcacctttgccagggcaaatcgaagaattcatgcgggtgaccacctgcagcgttgtagtacaaggatatgggctcactgagagttgtgcaggatgcttcacgtcaatcgccaacattttctcaatgattggaacagtcggccctcctgtcacaacaatagaagcacggctggagtcggtccctgaaatgggctacgacgcactgtcagacacgccccggggcgagatctgcttgaggggccacaccatgttctccgggtactacaagcgccctagcctcactgaagaagtgttctcagatggctggttccatacaggtgatatcggggagtggcaatccaatggcacgatgaagatcatcgacagaaagaagaacatcttcaagctgtcccaaggggagtatgtg

SEQ ID NO: 13742 - DNA, 350 bp, Zea mays
  Clone ID: LIB3159-004-Q1-K1-B10
gggggggggagagaagaaaaaaagggggggggagggaaggaaagggggaggaaaaaaagggggggaagagggggggggggaaaaaaaaaaaaaaaggggaggaggggggggggggagggggggggggggggagagggggggggggggggggggggaaggggggggggggggggaggggggggggagggggggggggggggaggggggagggggaggggggggggaggggggagggggggaggaggggggggggagaagggggggggggggaagggaggaggggagggaaagagagggggggggaaggggggggggggagggaggggggggagaggggggggggggggagg

SEQ ID NO: 13743 - DNA, 401 bp, Zea mays
  unsure (1)..(401): unsure at all n locations; Clone ID: LIB3159-004-Q1-K1-B12
cgacgcttccctccgccgccgtcagatcggagctcgactccgtgccccgcttctccggcgcgatggcggcgccaccgcgccgctccctccttgtccttctctccgggcttctagtcttcgcctcccttgttgccctcaccacagccatctacgaggaccaggtcggcctcgcggactggcatcagaagtacattcgcaaagtaaagcaagcagtttaccacagccagaagagtggaaggagacgagttgtggtcttgacagatgaaaatgtgatctcgtctcttgatctacgttctggagatatattctggcgacatgtcattgacaagaatgacccctnggatcagcttggtctatcacttggaaaaaatgttctaactctttcttggggggacctattt

SEQ ID NO: 13744 - DNA, 370 bp, Zea mays
  Clone ID: LIB3159-004-Q1-K1-B4
ccggtaaccacacctttgacccgctcatggacctcctggtcggcaacgtaggcctcatcttcaccaagggagacctcaaggaggtgcgcgaggaggtcgccaagtacaaggtgggggctcctgctcgtgttggtctggttgctccagttgatgttgttgtgccccctggcaacactgggctggatccgtcccagacctctttcttccaggtgcttaacatccccaccaagattaacaagggtaccgtggaaattatcacccctgtggagctgatcaagaagggtgaaaaggtgggctcgtccgagtctgccctgctcgccaagctgggtatccgccccttctcgtacggcctccaggtcaccagtgtcta

SEQ ID NO: 13745 - DNA, 238 bp, Zea mays
  Clone ID: LIB3159-004-Q1-K1-B6
aaaaaccggcgcgacgccacgcgtccgagtatatgtacaagctctgtaccaggactatgagaaaaatagagtgcaatagatctgtggggaaagattaaaatcacttgatgttgacagatgttgatgttacttgacatgtgttgaaatgagaacaaacatgaaagtgacgttgcttatgattaaataaaaatatatatttttaaagaactgctatttgttttaattttattaaattaat

SEQ ID NO: 13746 - DNA, 256 bp, Zea mays
  Clone ID: LIB3159-004-Q1-K1-C12
gcgtccgccgatcccacccggcagcggcgctgctctttggccacccacgcagctttcgccgtctggcgcatccccgccggcgcccggctgcacaacagggcgcctgcgtcttccatgcacggcgtgcagaggctggacttcgccgacttctccgggctcatgccggggtcgtgctccgtgagcgctgccgcgcgggaggcgtccttctaccacgtccttggcgcgcagctcgtcgtcaaagccaccggggataacg

SEQ ID NO: 13747 - DNA, 441 bp, Zea mays
  Clone ID: LIB3159-004-Q1-K1-C2
ccacgcgtccgcatttacatggttttcgagtatatggaccatgatctcaccgggcttgctgatcggccgggaatgcggttcactgtgccgcagattaagtgttacatgaggcagctgcttacaggcctgcactattgtcatgtcaaccaagttctgcatcgagatatcaaaggatctaaccttttgatagacaatgagggtaacttgaagcttgctgattttggccttgcaagatcattctcgagtgatcacaatggcaaccttactaaccgtgtgatcactttgtggtatagacctccagagttgctacttggaagcacaaagtatggcccagccgttgacatgtggtcagtgggctgtatttttgcagaacttctcaatgggaagccaatattgcctggaaagaatgagccagagcagctgactaagatcttcgagctt

SEQ ID NO: 13748 - DNA, 343 bp, Zea mays
  unsure (1)..(343): unsure at all n locations; Clone ID: LIB3159-004-Q1-K1-C3
gcgtccggtcgctctgcccgcattcccttccatattatctagacgccaggatgacggcacanacgggggatgagctcgccgcccgggttgagcaatagaagctcgaggagcataataccgatgcatatgatgttgtggtggaggatgatgagtactactacgatgaggactatgaggatgatgatgaacttgacggacaagaaggggatgccagcggcaagtcaaagtatagcatgagtgagaagaagattcgcaaagccatgctgaagcttgacatgaatcccatcactgttgttaatcgttgtaactgtgaagaaaagcaagaatatactgtttgttatct

SEQ ID NO: 13749 - DNA, 356 bp, Zea mays
  Clone ID: LIB3159-004-Q1-K1-C7
aaaaatataaaaaaaaacgcgtggatgaaaaaaataattaattctaatttttttaaaatatagtattatttaattaaatataataaataaatgctgttgaatttttaaaaaagaggggggggataaaaaaaaaatattattaaaattatttatttattttaaattttcattttattatattaattaaaatattataattattttaatttataatataaatataatcttattataatttatcttttatttatatatataatatatattaatataattaaaaaatatttttaattaaataatttattaaataaatattaatatatatattaatatattaatataaattaataatacta

SEQ ID NO: 13750 - DNA, 273 bp, Zea mays
  Clone ID: LIB3159-004-Q1-K1-C8
accgataaaaaacccgtcgcccaacatcaccatcactagacatcagcaggttttttcatatatattcctgttaacaagggcgggatttatcccagtgcgggaactctacaattttatttttaattctcaattctattcatctgtcatcataaatccatattcttaattaaatatttatcataccccaccaaaactatcttcttttaactcattttctaaaatttcttctaataatattatttttctcttttatctattattccatactatttc

SEQ ID NO: 13751 - DNA, 433 bp, Zea mays
  Clone ID: LIB3159-004-Q1-K1-D2
gtccgaacttttcctcgtttgggctaaaatggttgaacttgcatgggtggggtggaccactgtggggaaactggttggatcaacggttggcattgcaaaagaaaatactatcccggatgattgagcttgggatggtccctgttcttccatcgttctcaggaaatgtcccagctattttcgcaaaattatttccgtcagccaacattacgcgacttggtgattggaatacagttgatgctaatcctaagtggtgttgcacttatcttcttgatccttctgattcattggttatagatatggggcaggcttttatcaggcaacagataaaagagtacggtgatgtaaccaacatctataactgtgacacattcaatgagaatactccaccaacagatgaaccggcgtatatttcatcacttggttctgctatcta

SEQ ID NO: 13752 - DNA, 291 bp, Zea mays
  Clone ID: LIB3159-004-Q1-K1-D4
gaagatgccacttggaatcgtagccctgagaagaatcaccaccagagtgttgatgatgatcagaacaagttgctcactgaaaaggatcatgcacatataaataaagaagtgagaaaattcactcctcaaacaaaggcccatgctaagattagaaagcctgatgggtctactatcaaggaaaaggtggctccaaatcctaaacctgtaaccaaccttgtgaaagatttttccatgagcccacgagcatcaagtgacagcacagaaggcatgccacatagtgctaaccgatat

SEQ ID NO: 13753 - DNA, 355 bp, Zea mays
  Clone ID: LIB3159-004-Q1-K1-D9
cggcccttggttcccctccattattctacctcacctcaccttgccaccagccatgtgtgccgtgaccgccgcggccatctctctgtcctcctcctccgcctcctcccctgcggctgctgccaaggccaaggcggcgtccccgtcgtcgtcgccatgcacgcacctccagttcctgtcggcagcgagcccgcggcggcggtggcgggccggcgcccgcgcggtacgggcgcaggtgtccaccaccgagaccgcggcggcggggccggcgaagactttcaagaagcatgacgaggggctggtcaccaacaagtacaagcccaaggagccgtacgtcgggaggtgcctgtccaacacc

SEQ ID NO: 13754 - DNA, 266 bp, Zea mays
  Clone ID: LIB3159-004-Q1-K1-E1
ccacccgtccggaaaggagggacaaagggaggtcaagcacctcctatgctaaatgaatttctcttttatgcacatgatattttgctgtataattcaacaaaaatattgagttaccccctaataatatatcttttagcacttggcccttcttaaaaaaaaaaaaaaaaaaaaaaaaaaaaaaagaaagaaaatatataaaatataaaaataatttatgcgtccatgcgacggcatagcttttctcttagtgttacaccaaatccaat

SEQ ID NO: 13755 - DNA, 415 bp, Zea mays
  unsure (1)..(415): unsure at all n locations; Clone ID: LIB3159-004-Q1-K1-E12
cacggcgccgactgccacgcgcagctccacagcgccgccaataacgcgccttgccctggggaggagccgtccaggatcgcgcccatgtcangcggcaccttcgtcgccgtgcctggcaagatgcactacccgtccgcggagtgcgcgtccgcgtttctctgctccccgatcaagaagcacttgttagatcacttccacaaggcacccctgccggtgccggagtaccacccggtgcctgaccacagcaagccgccggtgccggagtaccacccggtgcctgagcacagcaagccggcgccggagtaccaccctcccacgccggaataccaccctcccactccagtgtacgggcagccaaagccaactccgatctaccatcctcccgctgagcactgagttcgatcaacaacgaacg

SEQ ID NO: 13756 - DNA, 438 bp, Zea mays
  Clone ID: LIB3159-004-Q1-K1-E2
cacccgtccggaataacggggaggaggcggaccgaccaacggcacaggcaccatggcgatgcgagcagctacagcggcggcgacaggcttcttctctccatccaccgtccctccgaggcgcttctcgtccgttacaccgccggcgtcactctgcaccgcgcgctgcatccagcgtcaccgtctccgcgccttcccaagcttggaaatacctctagaggaactcaacccatccgtcgatctacttaggagaactgcggaggccgttggcgatttcaggaaaacgccaatctatattgttggtacggattgcacagccaagcgcaacatcgccaagctgcttgcgaattccataatataccgctacctcagcagtgaggaactgcttgaggatgttcttggtggcaaggacgccctcagagccttcaaggaatctgatga

SEQ ID NO: 13757 - DNA, 103 bp, Zea mays
  Clone ID: LIB3159-004-Q1-K1-E4
cgaaaaaaaaaaaaagaagagaaaaagagggaaaaaaaaagaaaaaaggaagaacaaaggggggggaaaaaaaaaaggggggggggggcaacaaaaccaaaga

SEQ ID NO: 13758 - DNA, 409 bp, Zea mays
  Clone ID: LIB3159-004-Q1-K1-E5
caaagctctagttctagctagctagcatagggggggaaaatggctccgcttctcgctggtgccatgaaccacgctgcagcccatcctggccttaggagccacctagtaggacccaacaatgagagtttctcacggcaccacctgccgtcttcttctccacagagcagcaagcgaaggtgtaaccttagctttactacacgatctgcaatagtaggcagccaaaatggagtccaaatgttgagcccctcggaaatcccacaaagggactggttcccctctgacttcaccttcggtgccgccacttcagcgtaccaaattgaaggtgcttggaatgaagatggaaagggggaaagcaactgggatcacttctgccacaatcattcggaaaggatactggacgggaacaatt

SEQ ID NO: 13759 - DNA, 429 bp, Zea mays
  Clone ID: LIB3159-004-Q1-K1-E6
aagtaatcaaatgtttgtttcattatggcaagtaatcggtgatggttgaacaagaccgttgtaatttgaaagcatgcagctgattctattgattgcagttttatattgtgatgttgtgcgaggcatatgagtaccattttttcttcttaatatagcactagtgttctgataggcgcaggaaatcaacagctcgtgcagatgggtttcttcgagcaccctctcttgtcgacaaccttgttatatttcagaggttatttgtttgacatccatccatccatcttctctccaaatttaggtcggatgtacgagctctatcgacgttatagttgtgcctccgcgagtccgagctgacccagcagcgagtcaggtaccagcagtagagttgtttgttttgtcgtcccatactgaaaaatttatcatctatgcaca

SEQ ID NO: 13760 - DNA, 333 bp, Zea mays
  Clone ID: LIB3159-004-Q1-K1-E7
gaagcggcacggccgtggagggcctgctgggctgcccctactgctcccacccgcgtgcggccgtcgacttcagcctgctgtccccggccgaggccatgaagcgggaggaccccggctggttcggcggcggcggcggcgaggagccgcgccagggcgtctggaccatcgaggaggacctctacaccacgctcaagaagaaggtgagccgggtgtacgcggcgccgccggaggagaggaagaagcgcgtctacagcaccgcgccgtccaagttcaccaccatcgaccaatatagcgggctcgggttcaagctggtgaggatggggttcgacgaca

SEQ ID NO: 13761 - DNA, 210 bp, Zea mays
  Clone ID: LIB3159-004-Q1-K1-F12
ccccaccaaaagggaaaaatttttaaattaaacccatcccttttttaattctttttaacataaacactttttaacaaaaaaaaagaaaaaatttttgggttttttaaaaccaaaacaaaccggaaaaatactttatctttccattacaaaaggcttgacggaaaaccctttaaaaaaaaaattacctcccaacgtatttaaaaaaacaaa

SEQ ID NO: 13762 - DNA, 373 bp, Zea mays
  Clone ID: LIB3159-004-Q1-K1-F6
gctttcccaaccaaccatgaactcacccgcaccacgccgttaacgggtccagaacctcgcttccaatctgccctcccgtgtccccctccctgtccgattccccacagtagcgcctcgccctcgtcctcctcctccagtccggatcgccatttcccaccgatccgtcccggcatcggcatggctgcgcccaagccaaaggcgccggcgcccagtgcttcggcagcctagcgtttgtttgcctccgaggatttccgcctatcgcgttaccggatcttcggtgggccggcgaccctctacgccactatgagctccgacgggcgcctccgccgcgcgctggccgcgttcggcggcgacgtgtgggacctcgtggacg

SEQ ID NO: 13763 - DNA, 351 bp, Zea mays
  Clone ID: LIB3159-004-Q1-K1-F8
ctccagcgtccagcgccgcgcctgcttcgtccatggccggctccctgcgtcgggggggcctgcgagttgctcacgtggtcatcccctgagctctctctcccatgccgacgcgcgcgctctgcctctccctcagccgtcgcaccgtggttatctgctcggccatggaggtcgcggttccctgatctcctgctcgcctggccgcgtcgagctccatgctgggccaaagtctactccctgctcggattttgtcaagcctgtgagcttctctatgcgctctgctctttgtcggtctcatgctcccagctagcctcctgttcccaaccatggatgtcaacccggcccttgctccca

SEQ ID NO: 13764 - DNA, 394 bp, Zea mays
  Clone ID: LIB3159-004-Q1-K1-G1
gtccgccgagtacacggaggccacggtgacggaggtggtgtccacgggcgagaacgagtgcgacgagtacaagaaggaggagaaggagcacaagcacaagcagcacctcggcgaggccggcgccatcgccgccggcgccttcgcactctacgagaagcacgaggcgaagaaggacccggagcacgcgcaccgccacaagatcgaggaggaggtcgcggcggcggcggccgtcggctccggcggcttcgccttccacgagcaccacgagaagaagaaggaccacaaggaggccgaagaggccggcggcgagaagaagcaccacttcttcggctgattgatcctcccgtatcgtcgtccctccccgtgtgctacgcgtgcgtgtgagagtgatatc

SEQ ID NO: 13765 - DNA, 213 bp, Zea mays
  unsure (1)..(213): unsure at all n locations; Clone ID: LIB3159-004-Q1-K1-G12
acgcatccgctaaaccacactctaccgcactcctctttaaccacagctatgctcgcccaccgcctgcgccttctactcgccgtcgccgcggcnagcggcaccgccttcgctaagccgacggcgtacgaagccctcgctgactacgacttcccgccggggatccttcccaagggcgtggtcgactacacgctcaacaactcctcggacgccttc

SEQ ID NO: 13766 - DNA, 436 bp, Zea mays
  Clone ID: LIB3159-004-Q1-K1-G3
gcaatggcgagcagcaccatggccctctcctccacagccttcgccggcaaggcagtgaacgtgccgtcgtctctcttcggcgaggcccgcgtgacgatgcgcaagacggcggcgaaggcaaagccggcggcgagctccggcagcccgtggtacggccccgaccgcgtgctctacctgggcccgctgtccggcgcgcccccgagctacctgacgggcgagttcccgggcgactacggctgggacaccgcggggctgtcggcggacccggagacgttcgccaagaaccgggagctggaggtcatccactcccgctgggccatgctgggcgcgttgggctgcgtgttcccggagctgctcgcccgcaacggcgtcaagttcggcgaggccgtgtggttcaaggccgggtcgcaaatcttcaacgagggtgggctgggct

SEQ ID NO: 13767 - DNA, 436 bp, Zea mays
  Clone ID: LIB3159-004-Q1-K1-G8
aaaacattcaggagccaaaaggaaaagcagctctcatatggatgttgggagaatattggcaggacatgcatgatgctccatacatccttgaaagtcttgttgaaaactgggatgaagagcactctcctgaggttcgcttgcatctcctgacagcagtgatgaaatgtttctttaaaagacccccagagacacagaaggcactaggggatacattagcagctggtctatctgacacccatcaggatgttcatgacagagcacttttttactacaggcttttgcaatacagtcctaatgtagcagaacgtgtagtaaaccctcccaagcaagctgtctctgtatttgcagacacacagagcagtgaaatcaaagatcggatattcgatgagttcaacagtctatcagttgtttatcagaagccatcggacatgtttac

SEQ ID NO: 13768 - DNA, 377 bp, Zea mays
  Clone ID: LIB3159-004-Q1-K1-H1
cacgccgcacgccagccagcggccagcgcccgccccgccgcgcttcggcattttcccattggctctctctgccgccgctccctcccgcggcggactcgataccccgcctctcctctcgcgaactagggggcagcgggcaggtgccggcaggcggctcgatcccttcctcctccctcgtcgcggggactgctgctgctgctgccgtgaccgcgagcatggccaccggcgccgttacgccgccgccgctggctggcgcgcggcgattcccccgtggacgaagcttcctccaccggcgcctcgctacctcgcctatgaaagatgaatctgtgatttccacagatggtggaaatgaggagacagacactgacagcctccat

SEQ ID NO: 13769 - DNA, 324 bp, Zea mays
  unsure (1)..(324): unsure at all n locations; Clone ID: LIB3159-004-Q1-K1-H12
cacgcgtccgcgacggcatcgagcaggtcctcggcaccatggacccgtcgacgcacaacgtgacgcgcgagctgtggccgtggacgaagtcccangaggctggcttcgcgcactgcgctctgagggcccgggagagctgcgagtgggtggggttcatcgacgtcgacgagttcctccacttccccggcaaccagacgaccctgccagacatcctgcggagctactcgaacaggccgcgggtgggcgagctgaggacagcctgccacagcttcgggccctcggggcggaccagaatccccaagcaaggcgtgacgacgggctaca

SEQ ID NO: 13770 - DNA, 393 bp, Zea mays
  Clone ID: LIB3159-004-Q1-K1-H2
tcgcatttcttcccatccgatccccccttcgcaacccaaaccccaactcgccccgcagcggtggcgcccaaggccgagaagaagcccgcggcgaataagccggcggaggaggagcccgcggccgagaaggcgcccgccggaaagaagccgaaggcggagaagcgggtccccgctggcaagtccgcttccaaggagggcggcgagggcaagaggagcaggaagaagggcaagaagagcgtggagacctacaagatctacatcttcaaggtgctgaagcaggtgcacccggacattggcatatcctccaaggccatgtcgatcatgaactccttcattaacgatatcttcgagaagctcgctgctgaggccgccaagctcgcgcgctataacaag

SEQ ID NO: 13771 - DNA, 401 bp, Zea mays
  Clone ID: LIB3159-004-Q1-K1-H3
cggacgcgtgggctttgccgggaagcagctggaggatggccgcacccttgcggactatgggatccaaaaggagtctacgctccacctcgtgctcaggctccgcggtggcatcattgagccctcgctgcaggcgctcgctcgcaagtacaaccaggacaagatgatctgccgcaaatgctatgcacggctgcaccctagggctgtcaactgccgcaagaagaagtgtggtcacagcaaccagctgagggccaagaagaagatcaagaactgaggtgttgctgctagtcagtttcatggacaatgttgtttggttgttgaaccgtgtttgtttacgaactgtatttttgtttggttgttgaaccgtgtttggttaccgaacatattggccttatgttatgttt

SEQ ID NO: 13772 - DNA, 360 bp, Zea mays
  unsure (1)..(360): unsure at all n locations; Clone ID: LIB3159-004-Q1-K1-H4
cacgcgtccgctcactagtactcagccgccgcaatcagggtggcaggtagctcgagcgcgcgctccagctgcgccgacgcgatgcgggccaagtggaaaaagaagaggatgcggaggctcaagatgaagcgccgganaatgaggcagagatctaagtaggcgcatcttgtgaccgaggatggcgagcttctcctgcaccatggctgtgacgcgttgggatgattgtctccctttgtagacgtgctttgctgtagacgtangcgatgtaaaccgtcctttntgattaattctagtatgttctgagactgngtttatattgtaatttgaggataattatatgatgctctaagtttattgata

SEQ ID NO: 13773 - DNA, 341 bp, Zea mays
  Clone ID: LIB3159-004-Q1-K1-H7
aacgccacacactcaaccaacttaccaacttttttacccaccccgctcacaaaatattccctgtgctctatttaaaaacggtccctcccacaacaaactcaatacaccccctctcctctacccaactaatgaaacaaccttcatatgccatcaaacacatctatccattcctcctccctcttctcaaaaactactactgcttctaccctaacctcaagcatatccaccatctccaatacaccacccccacattctggctctcttctattcccccattaacaaaacttacatcacctactcctttctacctcgcctattaaaaataaatctattatttccac

SEQ ID NO: 13774 - DNA, 65 bp, Zea mays
  Clone ID: LIB3159-004-Q1-K1-H8
aaaaaaaaccgccggacccaaacaaaaaattaaattccattaatacaccccttttttttaccaca

SEQ ID NO: 13775 - DNA, 382 bp, Zea mays
  Clone ID: LIB3159-004-Q1-K1-H9
caagcttccctttcgttcctcctcgccccagcgacgcggcctcccgtagaccgagcggggcaacccaccactgagaggcacgcagaggagcaggaagccggagaccaagatgtcgtcggtgttcagcggcgatgagacggcccccttcttcggtttcctcggcgccgccgccgccctcgtcttctcatgcatgggcgcagcgtacgggaccgcgaagagcggcgtcggcgtggcgtcgatgggtgtgatgcggccggagctcgtcatgaagtccatcgtgcccgtggtcatggctggtgtgctcggtatctacgggctcatcattgccgtcatcatcagcactgggatcaaccccaaggccaagccctactacctttttgat

SEQ ID NO: 13776 - DNA, 187 bp, Zea mays
  Clone ID: LIB3159-005-Q1-K1-A1
tcgacccagcttcgatagtggcgcttacaaacttctgtttgggatctcacagcagcccatggcggatggtctgtctcaaccagagcaaagatatcgtgaccagtggtgaaataaccagataggttttcttacaattaacagccaacctgctttaatggagagaaatcctactcgcctactgttggtt

SEQ ID NO: 13777 - DNA, 331 bp, Zea mays
  Clone ID: LIB3159-005-Q1-K1-A2
ccggcgggacccacgcgtccggaagagctgcgcccttattttgcactattcatggttatggatggcctcttcactctggcgcataagctttttggagttgctgttgaacctgcagatgggctggctccgatctgcacagtgatgtcaaattttattgtgtcaaagactcttccagtagccctgttgcttacttttacttcgatccttattcaagaccatctgaaaagcgtggaggggcttggatgaatgtagtcttttctcgaagtcgcgtgctagctcgcaatggtttggctgctaggctgtctgttgcccatatagtgtgcaatcagac

SEQ ID NO: 13778 - DNA, 328 bp, Zea mays
  Clone ID: LIB3159-005-Q1-K1-A4
gttccatttgtggttctattctattcttatagccagcgactttgaaaatacagggcgaggtgcactgcttgctgagggttgccgcggttcgttatcagagaaaataataaaaatcacaagctcagagagagagggcaagggcaacatcagacatatgctcttggaattaaggaggtttgggagattgaagaaggaaagcacaatccaggttctgttattcatactgttggatggcctttggatactaaaacatatggaggatcattcctgtaccaccttgatgatagacagttggcatttggtctggttgttgcgttgaattatcgaa

SEQ ID NO: 13779 - DNA, 193 bp, Zea mays
  Clone ID: LIB3159-005-Q1-K1-A8
ttttatataagaattccagagagattttttgaacatgcggatcgtggcttgctcgggtgggtaaggttgggaagaggagtatttacccaccttaaggtatacaaagggacgaacatccgcacgaggctcaaaaacctgtcccactcccgatcagggattaaataattcaaattactggattctagatattcat

SEQ ID NO: 13780 - DNA, 394 bp, Zea mays
  Clone ID: LIB3159-005-Q1-K1-B1
gcggagtctagactcgagagcaacctctatttcccggatctctctcccacccacgccgggtcggctccttcgtctgctgcagcgatggcctcccccgacctgctcttcaatctgcggaacctcttctacctgggcgcctaccaggcagccatcaacaacagcgacgtcctgggcctcgacgccgactccgccgctgagcgcgtcgccatcgtcttccgctcctacattgttcttggctcctaccagctggtgatctgtgagatctactcgtttgccgttacctcgcttgaggctcgtgaatctgtttgtgccttacttttactgtttgacactggaagtttcctattatttcagtttttatgggaaatgtgttttagttttattcattcaattt

SEQ ID NO: 13781 - DNA, 214 bp, Zea mays
  unsure (1)..(214): unsure at all n locations; Clone ID: LIB3159-005-Q1-K1-B11
accacaaacacaaagnngggggctgaccgananggctcatcancannaagctattgcggggaattaacgcagggcgcgggcagatgcatcgaactaacttcggaattggcacagtatcaaagatcttgtagaagcacatactcctccggggggtcgaataggacgtgggcataaaggcctatatgatacaaacaataattcgaaacatttacaa

SEQ ID NO: 13782 - DNA, 196 bp, Zea mays
  Clone ID: LIB3159-005-Q1-K1-B12
ggaaagagtcatgtcaccactagagttatgggtacctttgggtatgtggcaccagagtgtgcaaatactggactcttgaacgaaaagagtgacatttacagctttggatcgttctccttgaagcaattaccggaagggatcctgttgactatggactcccaccaaactaggtgtatctagttgactggctaaaaat

SEQ ID NO: 13783 - DNA, 258 bp, Zea mays
  Clone ID: LIB3159-005-Q1-K1-B2
aaaaccggccgagccacgcgtccgcagtgtgctctttaactgtgaacactttttttaggattataagcaattaatatccttcagcggttctttaaacagagaaggggcgtccacttttaatgatccaaactaacgtgccgatcggcatagatacacaggttcataaccatactcatatgcatatcttcgccctcttattcacaacgctgtgactggaaaaacctttaagacactaagcaaaatcatttatcccctaaa

SEQ ID NO: 13784 - DNA, 392 bp, Zea mays
  Clone ID: LIB3159-005-Q1-K1-C7
gcctgcccacccaagcttccctttcgttcctcctcgccccagcgacgcggcctcccgtggaccgagcaaggcaacccaccactgagaggcacgcagaggagcaggaagcggagaccaagatgtcgtcggtgttcagcggcgatgagacggcccccttcttcggtttcctcggcgccgccgccgccctcgtcttctcatgcatgggcgcagcgtacgggaccgcgaagagcggcgtcggcgtggcgtcgatgggtgtgatgcggccggagctcgtcatgaagtccatcgtgcccgtggtcatggctggtgtgctcggtatctactggctcatcatcgcccgcatcatcagcactgggatcaaccccaaagcccagccctactacccttttgat

SEQ ID NO: 13785 - DNA, 335 bp, Zea mays
  Clone ID: LIB3159-005-Q1-K1-D2
tctaaattgaccagaaatacaacaattaacacatcttcagttgctccggaagattggtgctgggagcttaccatgggatctggaggctgacgataccaggttcaatatatttgcatttcctcctaccgatcaaatcaacgagaaataattaatgcagtcatgagtggaagagatgttctggtcataatggcagctggtggagggaagagtctatgttaccagcttccagctgtacttcgtgatggaattgcactggttgtcagtcctttactttcccttattcaggaccaggtcatgggactgtcagctttaggttttccagcatacatgctaac

SEQ ID NO: 13786 - DNA, 62 bp, Zea mays
  Clone ID: LIB3159-005-Q1-K1-D4
ggaaaaaccggccgacccacgcgttcggccgcataagcagaatgcggagaatggaacgacta

SEQ ID NO: 13787 - DNA, 226 bp, Zea mays
  Clone ID: LIB3159-005-Q1-K1-E1
gctgtagcggctgttaagaaatatgactttgtccaacttgatggtaagcccattaagagagagtatagttggttccaatgcgtccatctgcatcatctgctcatccagtccctatggtggtcatgctaggaatgctgtgaggagtgcaccaaaggatgctgcttcagcaggtatgtcgtatcatactacctcattattatggtgggaggcttgcttttctatcttt

SEQ ID NO: 13788 - DNA, 287 bp, Zea mays
  unsure (1)..(287): unsure at all n locations; Clone ID: LIB3159-005-Q1-K1-E3
cggaanaccgggcggacccacgcgtccggcgggcggacaatgagcaggcggaggatgagctgtgccaagccacaatgggtatcttgggtgactctatgcacatgcgcggggccaccggtggaaagcataaggcctggaggagaagcgaaagtatgagcttggtcgccagccagccaacaccaagttgtcaagcaataagacagtgaggagggtccgtgtttcgtggaggtaatgtgaaatggagggcttctttccttgatactggtaactactcattgggaagtgaa

SEQ ID NO: 13789 - DNA, 228 bp, Zea mays
  Clone ID: LIB3159-005-Q1-K1-E5
cgctggtgaggtactcgatcgcggtcaacttcctggggctgccagctatcaccgtgccgcggtgttattacaggggagggctccctctttatctccatttcatcatcccctctttttctttatccacgcttttttaccttttctactctattcattatgctttctgttagtattttttttctttatctttaatttcatttcttattttcttatctattattaacttct

SEQ ID NO: 13790 - DNA, 227 bp, Zea mays
  unsure (1)..(227): unsure at all n locations; Clone ID: LIB3159-005-Q1-K1-F12
acccacaccgccgccgcagcgcccccgccccagcgccgacaccgccaacaagaagcacaccgaggcgacccccgggcccaacccncaggagcccaccgagccccaccgggacgacgaggacgcgcagcccccaaaggccggggncaacggcgacaacgaccccgccggcgagcagcagaacgacgggaaancgcgcaacgacagggccagcaccgagggccaccggc

SEQ ID NO: 13791 - DNA, 329 bp, Zea mays
  Clone ID: LIB3159-005-Q1-K1-F3
tcccgagccgagccggcgagatggcggtgatgtctcgcgcgatccgcaacttcgccgcggcgttccgtcgaaccctgaccggtgcttcagggccggcgctgccgaaggaggcgcggcgcgggtgagggcggcggcgcccgggcgcatggggcgggatcaggaggacgggaggcgcgtgcagtgggtgtttctctgggtgccccggggtggggaagggcacctacgccagccgcctcttgcagctgttcggctgtccgcacatcgtcaccggcgaccttgtccgcgacgccctggtcacccctggcccccttttttcaacaagttttgct

SEQ ID NO: 13792 - DNA, 129 bp, Zea mays
  Clone ID: LIB3159-005-Q1-K1-F6
tcttctccctcttgtccggttcgggtggtcctcggtcgttgtgagtgagttagtcatctttctttttttatctccttaattccttccctccccagcccccccggcccggctgctgttcttgaccctgac

SEQ ID NO: 13793 - DNA, 422 bp, Zea mays
  Clone ID: LIB3159-005-Q1-K1-F7
cccaaggccaagccatactacctctttgacggctatgcccacctgtcgtccggccttgcctgtggtcttgctgggcttgctgcaggcatggccattggcatcgttggtgtgctggtgtcagggcgaacgctcagcagccaaagctgtttgtgggcatgatcctcatcctcatcttcgctgaagcgctcgccctatacggtctcatcgtcggcatcatcctctcatcccgcgccggccagtctcgtgcggactaggcacgttccacatgtctccgccacctggtcgtaaccgggtcgtgttttgtatcggtgatgagccgacaagctggagcacttaattttttttatgctgtctagttttttgaactgcgttgagtcgagaaaacaaaataaacttgggtagccgaaggggtgacctttttt

SEQ ID NO: 13794 - DNA, 341 bp, Zea mays
  Clone ID: LIB3159-005-Q1-K1-G1
gagattctgaactccccagacaaagcttgcaacctggcaaagcaggcgtttgatgaagctatctctgagttagacagccttggtgaggagtcatacaaggatagcactctgacatgcaactcctgagggataacttgaccctttggacatccgacctcacggaggatggtgctgatgagggcaaagatgccccgaaaggtgatgcaggcgagggacagtaatcttcggagggggtgcaaagttgttcgagccccaatgttttagatgctttatgctgtcgaagctgtgctgtgccattattgtagctgatttcgtcttcattcacctcttttttttttgtt

SEQ ID NO: 13795 - DNA, 189 bp, Zea mays
  Clone ID: LIB3159-005-Q1-K1-G11
ctacgactttgaccttctctctttctccgcggcctccgggacttcgttgcatcctccgaccccgcctatgaccccaacctcctccaatctgttaggtgggcgtgcgagatgttcccaacggctaatgaatctaatgactatatggtttcgcagtcgtactctgtgatgggcaagcttatttttagctat

SEQ ID NO: 13796 - DNA, 171 bp, Zea mays
  Clone ID: LIB3159-005-Q1-K1-G2
acccacgcgtccgggcaaaactgactctgtggcaagcattttctttgcggagaggagaaacaaaaggattggggggtcttttaggcggagtcggcacgtctattatggcactgctgcgttctactatctgctactgagggtgatccgagggctgccatgacggagtacttt

SEQ ID NO: 13797 - DNA, 351 bp, Zea mays
  Clone ID: LIB3159-005-Q1-K1-H1
tggtgctctgtccacctctctcgctctgggccgccgccgccgccctaagccacgtgctgaggctttcgttggtctcttcgccggcgacgagcacccagcagttctgtagaatggctgatggtgaggacatccagcctcttgtctgcgacaatggcactggaatggtcaaggctggttttgctggcgatgatgcaccaagggcggttttccctagcattgttggccgtcctcgccacactggtgtcatggtagggatgggacagaaggacgcatatgttggcgatgaggcacagtccaagagaggatttctaacgctcaagtaccccgattgaacacggtattgtgagcaac

SEQ ID NO: 13798 - DNA, 232 bp, Zea mays
  Clone ID: LIB3159-005-Q1-K1-H11
gctttgtttaatgacacaataagggcaaacattgcctatggaaaagatggacaagcaagagaggctgagatcatatctgctgcagaattggcaaatgctcacaagttttcagttcggcgctgcagggatatgacacaatggttggagagcgtggagcccaattgtcaagagggctgaagcagcgagtggcgatcgcccgtgcaattgtgaaagacacctagatcctgctttt

SEQ ID NO: 13799 - DNA, 318 bp, Zea mays
  Clone ID: LIB3159-005-Q1-K1-H9
ctcggggaccagcccggccgccagagacctcgacttcgaccacgaccacgacaccggcgggcctcccaagtaagaactagaccccccatgtacacgctcccagctccctcgtaggcaccgcctgcatcaagattcaattcaagagacaggggtgcatgggctaacctgcctttttcgcttcgtcaggggcaagtggtcgggttggccgccggtgagggcgtacaggaagaacacctttcatgcggcggcggcggtcaagaaggtcgagcagaagcagaagcagcagcagcagggaggtctgtacgtgaaggtgaacat

SEQ ID NO: 13800 - DNA, 447 bp, Zea mays
  unsure (1)..(447): unsure at all n locations; Clone ID: LIB3159-006-Q1-K1-A10
gccacttgcttgagtagcgaagcgcgagagcaatggcgtcgctgtcgtgcgcctccacgctgccctggacccccgcctcctacccgcggccctcggcggggcgctgcctcacggcctctcgccgggctccgtcgctggtcatcgtcgcccaggggaaggtcaagaagtaccgccaggtcatattgacagacgacatagaagaggtggggaagaaaggggatacactgaaggtgcgagctggattctaccgcaactttctccttcccaagggcaaggctacacttctgaccccagaagtcctcaaggaaatgcagctggagcaggagagaatagaagctgagaagaagcgggtaaaagaagacgcgcaacaacttgctcgagtttttgaaaccattggcgcttttcaactccctcgcanaggtggaaaaggaaaacagatctttggga

SEQ ID NO: 13801 - DNA, 369 bp, Zea mays
  Clone ID: LIB3159-006-Q1-K1-A11
gtgaatagctgtctatgcctctcgctgctgtgaagtactcccgcgggacgttcatctttcggggctcacagccagcctcctaccggagcttctccgaggaagttgctgtacttaaccgatactttgggggcctgaagtctggtggcaatgcttatgtgattggagatgcatcacgaccagtacagaagtggcacatctactacgccactgagtacccagagcaaccaatggtcaaccttgagatgtgcatgactggcctggacacgaagaaaacttcattcttttttaaaactaatgctgatggcaacacaacatgtgccaaggaaatgacgaagctctctggtatctctgaaattatccctgacatgg

SEQ ID NO: 13802 - DNA, 443 bp, Zea mays
  Clone ID: LIB3159-006-Q1-K1-A12
cggcgatggcaccgcaggagagctgctttcccagcttgtggactcgctggacttgtcgggagccaaatacacggtcctgtatgcgtcccaaccgtctggtttgctggagagcccttccggcctgccgctgggtaggcatctcgcggagaagaagactaacggcacgaaagctgtccagggcgaaaaatgcgatggcgagtgcctcgtcaagtcgagtctcctcgaaggaactttcgttgggatagtgcttctcatcatcctgatatcaggacttatgtgcatgatgggcatcgatactccctcgaggtttgaagctccccaggagtcttgatctctcccttggactgcagaatccgcgggggggttgtgacgagggcacgccgcggtgtttaagggggccggtgttctgttggtgtgcactgtggatatatattgtttagctt

SEQ ID NO: 13803 - DNA, 447 bp, Zea mays
  Clone ID: LIB3159-006-Q1-K1-A2
gcctgccccaagctggaggcggtcgatttgtcgcactgcgtcagcgccggggaccgctaggccgctgcgctggcggcggcggccgggctcagggagctgaggctggacaaatgccttgctgtcaccgacatggggctcgccaaggtggctgttggctgccccaggctggagaagctcagcctcaagtggtgccgtgagatctctgatatcggaattgatctgctggccagaaggccccagctccgagctaacatatcctaccttaggtgggaatggatcccttagatcaatttcctcacttgagaggcttgaggaattggcaatggtttgttgttcatgtattgatgatgaaggcctggaattgctgagcaaggggagtgattcgctgcaaagtgttgatgtgtcaagatgtgatcatgtgacttcccatgggttagcttcactcat

SEQ ID NO: 13804 - DNA, 52 bp, Zea mays
  Clone ID: LIB3159-006-Q1-K1-A5
acatgacccggtgctgggcgccctcagtggctacatcacgctgcgggagctc

SEQ ID NO: 13805 - DNA, 174 bp, Zea mays
  Clone ID: LIB3159-006-Q1-K1-A9
ggtaattgtaccagctacaactggtcagatgggcgttttgccaggccatgttgccacgattgcagagctcaagcctggtgttctctcagtacatgaggggaacgatgtgaccaagtactttgcgagcagtggatttgctttcgtccatgcaaactccattgctgatattgtggc

SEQ ID NO: 13806 - DNA, 272 bp, Zea mays
  Clone ID: LIB3159-006-Q1-K1-B1
caacacttggagccacatatgttgctagcttacatgcatgagtttggaccaaggaacaagtgttggcaggttagcacagggagaacgcgacaatctttccctcaaaattggatgaggtgcacaagaagagggctgattcatggtacaagacggtttcaaaatcattcgatttggctgacctttctctgtaaatgtttcttgtcggcattgatctatctgtttttggaagatgcaaatgaataaatcggtctttgctgggactctccaaaaat

SEQ ID NO: 13807 - DNA, 474 bp, Zea mays
  Clone ID: LIB3159-006-Q1-K1-B11
gggtacctcagaagcttggagagcctaaaatcaaggagccaccattaaaactcaagaataatgctgagaaagcttcgaatgttgtttctgatggaagagaggagcataagttaaaagtgccaacatcagaaacttcaaatgtggtttatgatccaagtccaagggatgggcagaacttagattcatcaccgacagctgtacctttggctgttacaatgaataaaaaagagcatgtgattgatatggaaaaggctgataattttgttgaggaccaactgcatcctccgcagccaatggcactgcggactgaaaaagtcactgtcaatcccagtgtacgtacaagaaggggaagagtaccttcagttgaaaaggtggaatcgacgactactgtcaagtccttttccattgcatcccttcaacaatataccaatagtttcagtgaggaaaatatcataagagacagcaggtttggta

SEQ ID NO: 13808 - DNA, 435 bp, Zea mays
  Clone ID: LIB3159-006-Q1-K1-B12
gagctgtgcaagaacatcaaccccgatgaggctgtcgcctatggtgctgctgtccaggctgccatcctgagcggtgagggcaatgagaaggtgcaggacctgcttctgctggacgtcacccctctgtccctgggtctggagactgctggaggagttatgacagtgctgatcccgaggaacaccaccatccccaccaagaaggagcaggtattctccacctactcggacaaccagcccggtgtcctgatccaggtctacgagggtgagaagaccccggacacgcgacaacaacctgctgggcatgttcgagctctccggcatcccccctgcaccccgtggtgtgccacagatcaccgtgtgctttgacatcgacgccaacggcatcctgaacgtgtctgccgaggacaagacaacggggcagaagaacaagatcac

SEQ ID NO: 13809 - DNA, 451 bp, Zea mays
  unsure (1)..(451): unsure at all n locations; Clone ID: LIB3159-006-Q1-K1-B2
acccacccgnccgcaaaaaannccgccgcggcgccggcngggaaggcngcccagccagcggcgaccaccaaggggcggaccaagcccgcaccggcggcgcagacgggacgggacgcacgcggcggcggcncaacagcacggggaggcaanggccgaggcgaacgaggccgaggcagaggcggacggggatangggcagaaccggggctacaagggcgacaacgggaacgagggccagggaggcnanggcggcggacgctanggggacggcgcccgaaccgggggaccgaaggagaaagggagagagacactcggcccccgacccggggcggaggcagacggaggggaaacaggaaaggcgacgccgcggacgacnctgagaggccaccacggagaaactaggagcgccacagcgggaccggccacggctacgagacgaaagcggatggcgc

SEQ ID NO: 13810 - DNA, 267 bp, Zea mays
  unsure (1)..(267): unsure at all n locations; Clone ID: LIB3159-006-Q1-K1-B5
gcacaagcgcactctagcaatggcttctgaggttgtccgccctagcgacgccgagctactaaaggcacaagccgacatatggcggctcagcctctcctacctcacgcccctgtcactgaggtgcgccgtggagcttggcatccctacggcgatctaccgccatggcggngctgcctcagccgctgagctggtcacggcgctgtctctcccctccacttaagctgccgttcctccggccgcctgctgcgggctccctcgcccgcgttc

SEQ ID NO: 13811 - DNA, 277 bp, Zea mays
  unsure (1)..(277): unsure at all n locations; Clone ID: LIB3159-006-Q1-K1-B8
ccggccgaanccgggcgaccacgcgccgcaccgaccgcaagaacggaaataaacgggnnccagaaggaggccaacggcaaggacgaggccagcacgacgcggaacagnncggcggaccncncancnccnnncacgnggaacacaaaacaggganccggcnncgcggcagcagagaacgagacncgacaaaacgcgggaaagcaaggcgccctgcgggaaggcaacacaccngcaaaggagcaggccaaggncnggaaccanacaacaaacaaggaca

SEQ ID NO: 13812 - DNA, 481 bp, Zea mays
  Clone ID: LIB3159-006-Q1-K1-C1
tccgactgttcaatggatccgaaaggcttagttattctgaaattgcaacacaattaaacctgtcagatgatgatgtattgcgtttgctccattcactttcttgtgcaaaatacaagatccttaacaaggaaccagcaaatagatccatctcgcccaatgatgtttttgagttcaattcaaaatttactgacagaatgagaagaattaagattccactgcctcccgttgatgagaagaaaaaggttgttgaagatgttgcaaaaaccagaggtattgcaattgatgcattcaattgtgcgcattatgaagagccgcaaagttatgggtcatcaacagctggttgctgaatgtgttgagcagcttagccgcatgtttaagccggactttaaagccataaagaagaggattgaggatctcatcacaagggactatttggagcgcgacaaggacaacgccaatacgtacaaataccttgcctgat

SEQ ID NO: 13813 - DNA, 435 bp, Zea mays
  unsure (1)..(435): unsure at all n locations; Clone ID: LIB3159-006-Q1-K1-C2
ccaccggaaaaggcgcaagcaggggggcnaatagcggcagcggcagcggcagcggcagcaaccaaaagcagggcngccccaacggaaaagccnccaagggngccggcagccacggaggccccagcagccggcganacacccgcgctaacaccggcnacaacaccgcagagcacnncnngagcaacggggcaaccncaggggggggcngaaccnagcncgaaaaggcaacnnncaggcgggacncccaaaggccaggaggcacnctctccagcgggnccnggagaaacgccgggacagggncgngagcaaagctccatacagcaccgccaagtcgtccgatggcatggagtcaccgaggattgacgtgacagcggagggcaaggcccagtaactcgaaaggtccccgcggagtcccatcggtgaaagctgacgttg

SEQ ID NO: 13814 - DNA, 469 bp, Zea mays
  Clone ID: LIB3159-006-Q1-K1-C7
gcgaactctcttgtattcttgaatttgatggagcttgtaaaggaaatcctgggaaatcaggtgctggagtcattattcggcggttagatggatctgtgattgctgtactacgtgagggtttgggtattatgaccaacaacgctgctgaatatcgtgcattgatcctggggctaaattatgcttccaagaagggattcaagtatattcgttgtcaaggtgattctaagcttgtctgtaaccaggttcatggtgcctggcgtgctatgagcgataatatgtctatcttgtgcgatatagccaaggaacttaaggaaacattccttacatttcaaatcaatcatgttttgagggaattcaactccgatgctgacgttcaagctaactttggatgccaacttgctgttgatgaagttcaagagctgtccgtttgaattgccattggcagagaaaacaagacacggtgcttgag

SEQ ID NO: 13815 - DNA, 441 bp, Zea mays
  Clone ID: LIB3159-006-Q1-K1-C9
cataatcgcatccatttgtcgtcaatgcatcttctacacatagaagctgcatgctccgttgccaggtctcgtatgagtgacggctgcacggcgtcctcaagtcagtaatcaggatatttttggtggtctacagacaaagactaaaggtcgccagattaagatagaggattatatggcagttttgtgatgaataaatcagccgatacctggagtagtattatttggccacggataaggcgggcactgtttctcatctacttctccctgttctttttatttgtcgcgtttaagttcaaaaatgaactagacgacaaatatttgagaacgaagttagtattacacatatattgggtacgtcatacgtaggactattcgcattgtacacaattctttcaacgcttgtaaagactgggagaaagctttagcaaatgggataacaca

SEQ ID NO: 13816 - DNA, 454 bp, Zea mays
  unsure (1)..(454): unsure at all n locations; Clone ID: LIB3159-006-Q1-K1-D1
gacagagttgccattctttgcctccaaggttcggctcggcaagaatggagtggaggaagtgctgggtctgggtgagctcaacgagttcgaaaagaaggggctggaaaacctcaagggcgagctcaagtcttccatcgacaagggtatcaagtttgcccacgggaactaggcaccttgcccggcttctaacaattgatgccccttgcatttttgtttgactgcctatttttcctgccccccgtatggttggngcaatgaggcgttatggtcgattataaaacccagcggaacaaagaaaacgggtaccagaaactgtttgcaaacaccggtgcctttttttttgtgttgaaccaccattagttgagccgtgagggaatggtgaacaagctttccacttgctcattttcgagcgcttctccttgattgtatgcatggtttggactcatgactggac

SEQ ID NO: 13817 - DNA, 448 bp, Zea mays
  Clone ID: LIB3159-006-Q1-K1-D3
gggcgaccgagcgccgacggacacgctagctctcctctcgagtacctggccgggcgccgctggcctgaccagtccccacgggccgcggtcaatgtttcttccggtcgactcgacgtggctcgctcgccagggggacgtcgaggctgagccgaccccgacggcgtccccgggccggggccgctacttccggggggggaccgccggcgggtgcgcgtcaccgtgcgcaagtccaccaagttgggctccgaagccggtgcttgcacctggaactccagaccatgagccccgtgtgtccaacctcttcggggtggagatctactggctgagtcgtcgcgcaaccccaccccggggcgggtccagctttaaaccacgccgactttttcaacatcgtcggcgccgcccgcaaaggaagcggaagagcggcggtggacgaggagaatggcgcatg

SEQ ID NO: 13818 - DNA, 407 bp, Zea mays
  Clone ID: LIB3159-006-Q1-K1-D8
gaaaccctcacctcttcccttcctccccgccgccgccaccgccggaaggagaaaaaaaatgggtgccgatggggaagaagcgtcgcggatagtcgtgccaatggcggtggaggggacctcggagcagctggcgttcgtggaggagtcgaagctgcagaagcgcaaggagaacgcggactgggccgtcaggaaccgggagcgcagggcggtaaagcgccagcgcatccgcgacgagcacaaggtcaccgtaaggcgggccgaggactttgttgcggcgttccggaacaaggaacgcgacttcctgcggatgaggacccgcctcaaggtccgtaagcagccggccgccgaggcgctcagcttcaagctcgtcttcgcaattcgcatccctggcttccgggacttgcatt

SEQ ID NO: 13819 - DNA, 454 bp, Zea mays
  Clone ID: LIB3159-006-Q1-K1-D9
ggttccagcaggggctgtacatgggcaacggctgtggcgccaacgtcgtggcgcccggctacaccaagggcgacggcctaggcgccgagatcgtcggcaccttcatcctcgtctacaccgttttctccgtcaccgacgccaagaggaacgccagggactcccatgtgccgatcctcgcccctctttcaatcgggtttgccgtgtgcctcgtccacctggccaccatccctatcaccggcaccggcattaaccccccgcggagcctttggcgccgtcgtaatttacaaccagcaccatgcgtgggctgaccactggatcttctgggtcgggcccttcatcggcgctgcgctggctgtcatctaccaccaggtgatcataatgcgatcccctttaagagaggtcttataggagccgatgctgctgtttcgagatgctgccgtcttgaaaggatgga

SEQ ID NO: 13820 - DNA, 391 bp, Zea mays
  Clone ID: LIB3159-006-Q1-K1-E6
gtcgagaaccccgagttcaagaggaagcttgacaggatggttgagatcaaccagaagatcattgccgtcggagagtccgacgaaatccccctagtgaagaacctgaagaggattcctcttgtcgcctctctggtgtccgagatcatcgcggcatacctcatgccccccatcgagtctggctcggttgatttcgccgaatttgagccccagctcgtttactgatcctgtacaaagatttatcctcgagttattcaccctgaaagacaggttgggggggctttctgccgaaggggccttgaatgaatggtgaaaaccgctggatggttagaggatctgcatattcgtgtgttcttctgtaaaatactgagacttgggcagcataaaaagtttg

SEQ ID NO: 13821 - DNA, 465 bp, Zea mays
  Clone ID: LIB3159-006-Q1-K1-E8
cgacgacgaagggtgtgggctggtcaacatgatcttcttgatttcagatttatttgatttgtgtgtcataatcgtttcgctttcagtttagcttcccttttcaattgtaacattgcaatcgacgctctctgatcgattgccctggtgcaatcagagaaaaggatgtgaactcgtgaatcatatatggtaagcacaggcagaggcccttagagttgcatctttaatttggttggatgctcactgtttttgtgtttagctggggatgaatgaggtacactggtgcatcaaccatcggatcaaaatattatgccaggatcattgtcatacacattcaagctacaggattaggctgatgtgatttaactgcgctcatcaaattgctatgcgtctagtagattagtttcatgtagagggtatttagcgctgaatatttttggtcagcgtctgtttgtaatgtacattctg

SEQ ID NO: 13822 - DNA, 464 bp, Zea mays
  Clone ID: LIB3159-006-Q1-K1-F11
gcccaagaggcctcgcacgaccgctgctggggatgccaaaaatggagctgtagcacccgggggaggtaacggcgctggtgttggtaacggttcttcacttcatgtgccgacggaggctggcggttggttgggtaatggatgctctgaggcgaaatctcatgatagaaccgttccattgctcaaccacgaggtctctggtgaagactcattcaggcacgccgtgaagagtagcggctgcattgttgaccacggagtctgggtttggaaccttgagttcttggttagaaagtgaaggtcaagaggaaggagctgttcctgaatcaaaataccggttaagaaagagaagaaccataagaggccacacaaacagagccctttgtacgttctatcacgctcgatgaatcgaaaccaaactcaaaaggaaaaggaaggtcaaacctaatatggaatggaacagaaaggct

SEQ ID NO: 13823 - DNA, 397 bp, Zea mays
  Clone ID: LIB3159-006-Q1-K1-F7
ggtgtccctcgtccgcgccctgctctacatcatcgcgcagtgcctgggcgccatctgcggcgtcggcctcgtcaagggcttgcagagcgcctactacgtgcgctacggcggcggcgccaacgagctcagcgacggctactccaagggcaccggcctcgccgccgagatcatcggcaccttcgtgctcgtctacaccgtcttcttcgccaccgaccccaagcgcagtgcccgtgactcccacgttccggggttggcccctctgccgattgggttcgccgtggtcatggtgcacccggccaccattctcatcaccggcaccggcatcaacccggcgagggacttgggagccccggtcatttaccaacaaggcaagggctgggacgaccaatggatcttc

SEQ ID NO: 13824 - DNA, 256 bp, Zea mays
  Clone ID: LIB3159-006-Q1-K1-F8
cgaaaaccctcgcggcgaggagcgctctccgtcccacacacgcgcgccgtagcctccgcaggccgcacctgccttcacgacttgacgtgctcctgcgctactctcctcgagcgcggcgcggagcacggggacatcaaatggcggcagcggcggagatcggtggtttcgcggtggcgagagtggcggtggctgacgctcatgccggctgtgcacccagccccggcggcggcaccgcatcagcctaggagggcggtgg

SEQ ID NO: 13825 - DNA, 172 bp, Zea mays
  unsure (1)..(172): unsure at all n locations; Clone ID: LIB3159-006-Q1-K1-G12
gaggagaagcaccaccaccaccaccggggccaccacaagaaggacgaggagcagcncgccgccggcgggaacggagagaccgccgagaacacggaggccacggcgacggaggaggngnccacgggcgaaaacgaggacaacgaggacaagaaggaggagaaggagcacaagc

SEQ ID NO: 13826 - DNA, 421 bp, Zea mays
  Clone ID: LIB3159-006-Q1-K1-G9
ccggctctccagcgcgccgtctctgcccagatccaggagatatgcctcgctatgatgatcgctatggaggcacgcgcttgtatgttggcagattggccccccgtactcgttctcgtgatttagaatatctcttcggcaaatatggaagaatacgagaagtggagttgaagcgcgactatgcatttattgagttcagtgaacatcgtgatgccgatgaagctcggtaccaactagatggcagggatgtcgatggaagtcgcattgttgttgagtttgctaaaggggtcccacgtggtccaggtggctcacgtgaatatatgggaagaggccctccaccaggcacaggtcgttgtttcaactgtggaatggatggtcactgggcaagagactgtaaggctggtgactggaaaaataaatgcta

SEQ ID NO: 13827 - DNA, 464 bp, Zea mays
  unsure (1)..(464): unsure at all n locations; Clone ID: LIB3159-006-Q1-K1-H8
ctgatttgtctgggagggaaactctggttcggatcaccggtggcatgaaggtgaaggctgagcgtgacgagtcgtcaccttacgctgctatgcttgctgctcaagacgtcgcacagcgctgcaaggagcttggcattactgcactgcacattaagcttcgtgccaccggaggcaacaagaccaagacccccggacctggtgcccagtctgccctcagggcgcttgctcgttctgggatgaaaatcggacgcattgaggacgttacccccgtcccaacggacagcactcgcagaaagggcggtaggaggggaaggaggctgtaagcatctctggcggctcttggcggcatgaagctagtcctctctgggtggtgttgctgttttctgtgtttgtcaagacgagctntaattttgctcgagtaacctgaaacggtcggacgcgtgggctgttgcatccaaatttta

SEQ ID NO: 13828 - DNA, 450 bp, Zea mays
  Clone ID: LIB3159-007-Q1-K1-A1
gtctcaatcacaagtggcttcaatattttgatattgtaataacaggcagttcgaagccaagggggttccatgatgataaccgtgcaggattgtttgaagttgagcctgattctggaaaacttctgaatgctgatattcagatcggaagcccaagatcaagtcatcaacactcaacaccagttcagaaagtttatcaggggggcaatgttggtcatctccacagattactttctgttgcttctagttcacagattctctatgttggtgatcacatatacggagatattctgcggagcaagaaagttctaagctggcggactatgctggtgattccagaactagaacaagagctgaagcttctctcagaatcaaagtctactcgaaaggagcttagacatcttaaaatggagcgtgattcgattgaagacaaaatccatcatcttgaatggt

SEQ ID NO: 13829 - DNA, 415 bp, Zea mays
  Clone ID: LIB3159-007-Q1-K1-A10
aagccattccctcttttttacagtttagaagggctatatgaaggtagtgtggctatcggagagttaaatttcacatgaactgcttttgatcttcctccaccttcagctccatctaggagtgtgtctggacaaagtccaaatcccttgagtactaattcacttgatttggatggacaagaaaccacaagtgtgttcaatctgtctactaatgctcactctgtcccagtcagtactaatgaacccaccgaagctcagtttgtcccatctaatcaagaatcaagccaaagagaaggtgccagtgggagaaagcgtaagcaaagccatgttggattagccttgaaagttatgtggagtttaaaaagatcaattttctattagcaagtgtcaggctgaattgaaagaaatggatggatta

SEQ ID NO: 13830 - DNA, 422 bp, Zea mays
  Clone ID: LIB3159-007-Q1-K1-A11
cgcgaagccaccaccacaactccacaagatctagaacctaagaacctgcagaggagagggagaggagcttggggaggagatggccggcgccgagggcgagaggtgggtggggctagcaacggacttctcggaggggagccgggcggcgctgcggtgggcggcggccaacctgctgcgagccggcgaccacctgctgctgctgcacgtcatcaaggagcccgactacgagcagagcgaggccatcctctgggaatccaccggctccccgttgattcccctctcggaattctctgaccctatcattgcgaagaaatatggagcaaagccggacatagaaaccttggacatcctgaacactacagctacccagaaggatatcgtggtggttgtgaaagtcctgtggggtgatccgcgtgagaagc

SEQ ID NO: 13831 - DNA, 412 bp, Zea mays
  Clone ID: LIB3159-007-Q1-K1-A12
cgggtgggacaccgcggggctgtcggcggacccggagaccttcgccaagaaccgcgagggggaggtgatccactgccgctgggccatgctcggcgcgctcgggtgcgtgttcccggagctgctcgcccgcaacggcgtcaagttcggcgaggcggtgtggttcaaggcgggctcccagatcttcagcgagggcgggctggactacctcggcaacccgagcctggtccacgcgcagagcatcctggccatctgggcgtgccaggtggtgctcatgggcgccgtcgaggggtaccgcgtcgccggcggcccgctcggggaggtggtcgacccgctgtaccctggcggcagcttcgacccgctcgggctcgccgacgacccggaggcgttcgccgagctcaaagtgaaggagatc

SEQ ID NO: 13832 - DNA, 443 bp, Zea mays
  unsure (1)..(443): unsure at all n locations; Clone ID: LIB3159-007-Q1-K1-A2
caagaaggaaattcagctgcagcttgagaagatgaagaaatatgcttctgttatccgtgtcatggctcatacccagattaggaagatgaagggtttgaaacagaagaaggctcacctgatggagattcaggtcaatggtggtaccattgctgacaaggtggactacggctacaaattttttgagaaagaggtccctgttgatgctgtcttccagaaggatgagatgattgacatcattggtgtgaccaaaggtaaaggttatgagggcgtggtcactcgttggggtgtcacccgccttccccgcaaaacccacaggggtctccgcaaggttgcttgtatcggtgcatggcatcctgctagggtctcctatacagntgcccgtgctggtcagaacgggtaccaccaccgcaccgtgatgaacaagaaagtttacatgatcggca

SEQ ID NO: 13833 - DNA, 304 bp, Zea mays
  Clone ID: LIB3159-007-Q1-K1-A3
ttgtacctcctagctttctttgactgtgcaaggtgcccgccgcctttatgatcccggaacgttggctccaagagtagcggcggagactgacgtgatctgatgcctggaactatgagaatgataacagaggagaggtactgctacgagcaacatgggactgacgatcatacgcagctccttggacatccgacatggcacgtctaggtgtgcgcaactcttgagcgtggacgtcggtcagccatgcgctggcagctggcgcctggcgctgtcgccgccgccggcagctcaagaaagagaagagctc

SEQ ID NO: 13834 - DNA, 276 bp, Zea mays
  Clone ID: LIB3159-007-Q1-K1-A4
tctttccttctacctctttcttttcttatcaactcagacccgcaatatctccgggcgatgctctctcacacaaggtgcggacgttccactgtgcgtcattcatagcagatcaaccctccccatacctccccaacatatccccctccgaaatgcagtacaatgctgatgataacattgcccaaatcgtacccaacatcctcatggaccccctcaacatgatctgttgcgatttcggccccttctttcctcatatttccaccaaggagcctatttggc

SEQ ID NO: 13835 - DNA, 439 bp, Zea mays
  Clone ID: LIB3159-007-Q1-K1-A5
gagcgacgaagcgcgcacaaagagaagaacctcggagctgagatggcacaagccatggggtggatgacaggcctctcgcagggcgtcctgcccagcaggcgcgccgacagcagaaccaggacggccgtcgtcgtcgtcagggcgtccgcggagggcgacgccgttgcgcatgcgggccgccgcgccgtgatcgggcttgtggccactggcatcgtcggcggcgccttgtcgcaggcggcgcgcgccgagaccgtcaagaccatcaagattggagccccgccgccgccctccggtggactccccgggactctcaactctgaccaggcgagggacttcgacctccccttgaaggagcggttctacctgcagccgctgccgccggcggaggcggctgcgaaggtaaagacgtctgcgcaagacatcatcaacctcaagccgc

SEQ ID NO: 13836 - DNA, 410 bp, Zea mays
  Clone ID: LIB3159-007-Q1-K1-A6
cctcctctctccgtcgacctcgctctcgcctcgccgcctccgacccgcagcagcgcctgcggggctctctctcacgagtcccggcgttccagtggggggcattcatggcggggcagtccgacccgcacctctccatcttctcgccctccgaggtggagttcgtggctgaggatgagattgtcgaaatcgtccccaacatccgcatggacgccctcaacatgatctgcggggatttcgggcccttcttcccccagattcccaccaaggtgcctctctggctcgctgtcgcgctcaagaagcgtagcaagtgcaccatccgcaccccggactggatgactgttgaccgcttgacacaggtattggaagcggaaagagaagcgccacgagaattccagccattaccattccac

SEQ ID NO: 13837 - DNA, 412 bp, Zea mays
  Clone ID: LIB3159-007-Q1-K1-A7
tgctcctgtactcccagctcctttgccgagcaagggcccgccgccgttagatcccgtgccggagctccaaggtagcaacgagactgacgtgactgatgctggagcaggagaagaaaccgaggagggtatgcacgagaacagggacgagatcaacgcgctcctggacaccgacaggcagtctggtggcgcagccttgagcgtggagtcggtggccagcgctggcgctggcgctggcgctgcgccgccgtcggcagccaagaagagaaggctcagctcctgcaccgacaagtccgtcgttgacacggccagttcagcagcaaggcctcctgagcgttccatggagcacgagcagagggttgaacttgcgaacgaccgcgacgcgcagtcgtgctgcgttggggaggtggaaagc

SEQ ID NO: 13838 - DNA, 403 bp, Zea mays
  Clone ID: LIB3159-007-Q1-K1-A8
gctgcagctacttatccgttctcttctccctgaaaagatcaacaaacccatctccagcccggaaggccacaggctagatctgaccgaccgtccatgcatggcttccctgtgcatgtttaccatcagcagcaccccacatgttccgcagggctgcaggcgacgatgtagcgacgccgtgtcgtctaggccgagatcctacctcgtctgccaaagtcaccttccgtccgggccgccggcaagcggcggcggcgggggaggaggtggtgaggagaagacgaccccgtggtgggctgccacggccgagaggctgcgcggcgacgtggtgaatgccgggatggcagcgcgggagagcctgagccccaagcagaagggggactggaaggacgtcacgctcatgagcttc

SEQ ID NO: 13839 - DNA, 364 bp, Zea mays
  Clone ID: LIB3159-007-Q1-K1-A9
ctacaagctcgcctatgatgggtttctctccaaggtgccgattcctcctggacaagttgatgctataaacgatgcgttgtcagctgaaggagcggcagacgactacgaagcgtgcctgaagcagcttgtcaagaacggtgtgatttctatgtcagcggcgactggatttcccaggtttgatctccagcttctgggaatgggacctgatggccacattgcgtctctcttccctggccaccctcttgttaacgagaaagagaggtgggtcacatacattaaggattctccaaagccaccttcagagagaattacattcacgtttccaataatcaactcatccgcatacgttgcgatggtggtgact

SEQ ID NO: 13840 - DNA, 444 bp, Zea mays
  unsure (1)..(444): unsure at all n locations; Clone ID: LIB3159-007-Q1-K1-B1
cgtctgccttgtgcgcctccatttcggcctctgtcccttgcaagttcaatctcacctccaaccgtgggtaaagagaagtcccacatcaacattgtggttattggccatgtcgactctggcaagtcgaccaccacaggacaccttatctacaagcttggaggcattgacaagcgtgtgatcgagaggtttgagaaggaggctgctgaaatgaacaagcggtccttcaagtacgcgtgggtgctcgacaagctcaaggctgagcgtgagagaggtatcaccattgatattgctctgtggaagtttgagaccaccaagtactactgcacggtcattgatgcccctggacaccgtgacttcatcaagaacatgatcactggtacctcccaggctgactgtgctgtccttatcattgactccaccactggtggttntgaggctggtatc

SEQ ID NO: 13841 - DNA, 417 bp, Zea mays
  Clone ID: LIB3159-007-Q1-K1-B12
cggacgcgtgggttacaacaccaggcaccatgactttgagagttcagtagtcgcacgaggagacctttggaggttggagtcatcgcgtggcaatttaacttcagggaatgatagctcaccacttttccttgttcaacttgggcctttactgtttgttcgagactccacgcttcttttgccggttcatctgtcaaagcaacaccttctttggtatggttatgatcgcaagaacggaatgcactccctatgcccagctatctggtcaaagcatagaaaatggatgctgatgtcaatgatgtgcctcaaccctgtagcttgttccttcatggatgtgcaatttccaaatggacaaatgacatatgttgctggtgaggggataacagcaagtggttttatccctttatttggtggattact

SEQ ID NO: 13842 - DNA, 451 bp, Zea mays
  Clone ID: LIB3159-007-Q1-K1-B2
accggggcgacggacgcgtcctcctgtttcttgtactcatccattcttttctctctgcatagaacaacaaacccaacttcccacgcagtaggtcacagaaagagctgtcctacctttcatgcattgctcatcctgtgcatttttaccatcaccaccaccccacatgttatctacgactgcagacgactatatagccacgccatctcgactaggccgaaatcctacctcgtctgccaaagtcacctctcgacctggccgtcggttatcgacatcctcagtggaggacgtggtaaagataaaaccacccctttttgtgctggcaaggtcgaaacgctgcgcggctacttggcgaaagccggtatcgcagcgcgggagagcctgatccccaagcagaaaggtgactggaaggacgtcacgctcatgaacttcttcttcgccgtgtacgtgtaca

SEQ ID NO: 13843 - DNA, 402 bp, Zea mays
  Clone ID: LIB3159-007-Q1-K1-B3
ctttgtcatttcaatcaatgctaactgcatcgactccaccctgcctgctgaggccgtgtttgcggcggaagtggagaagctcaaggcggatcagttcaagcccgcggagcaggtgacgttggagccctacgagcgtgaccatgcatgtgttgtgggtgggtacagggtgcccaagaagcagaaggccacctcttaggatcggaatccgtgctcgtcttgcctaccaaagatgcttcgttgtattgtggtttattaagaaactttgaaggattagtcaaagtatgtgaaccttctgcagtgaaggctggtttagcagcgacagctgttagggtctgatgcagtgtttgctggtttaacagcattattattattattggtgatgaaacatgggttttggttcgt

SEQ ID NO: 13844 - DNA, 454 bp, Zea mays
  Clone ID: LIB3159-007-Q1-K1-B4
gggcgacggacgcgtcctacgttcacttctgcccttccctaccaaacatttattcctactgatcgcttggcacacatcttgcgtgtgccaagataatagggcaggcatcactgcctccataaagcacccagatgtttcttcatactcaactgtacctccctgtatatatccacttgttgctctttccaatcgttgtactcgagggtctctaatctcattgctggcaagcaaaaggctcctctcccataattctctggtcagtgatttataactgactgttcgttttctctctatataacgagagatgtatatttgcgaacttgttatgcttatgttcgccaaccactatatattgttgctgaataattgcaacttcctacacaccgtattttgttgcacctgcatactcccctgaaattttgttataatcttactaacctcttttttttttttt

SEQ ID NO: 13845 - DNA, 444 bp, Zea mays
  Clone ID: LIB3159-007-Q1-K1-B5
cacgagtcggcggtgagtttccatggatcgcccgagtcctcagtcagggcacacagcagtgggatctccatcaggttctacaagaagaaccattccaatgtgagaccacccagcgagaccaccgcagcccctgataacgtagagacagtttcaaggctcctggaaccgtaaccaagcgagaagaaggctagctcggtgaccgaacgctgcgggccgcggccaccaccacaggtacctgaacggaaaagctcgccacattctgaagcctctcaccttgacgaccggggctgtgtaaatcttccgagaccgccactggcgcttcctcctcgagcccctgctgtaaaaatgaacggactcctagcgttttgtgcgcctgggtcgcacgctgactagtgaatctgttggcagttgtgcgccgcagcccgcaggccatggctctagtga

SEQ ID NO: 13846 - DNA, 431 bp, Zea mays
  Clone ID: LIB3159-007-Q1-K1-B6
tacactcgggcccttcccagcgaaagataaatggctactgatcgcttggcacacatattacgtgtgccacgatgatagcccaggcatcatggcctcgatgaagcgcccagctgtatcttcatactcaactgtccctgcgtggagaagtccagttgttgctctgtccaatggtggtacgcgagggtctctaatctcattgctggcaagcaaaaggctcctctcccataagtttctggtcagtgatttataactgacggttcgtttcctctcttgataacgagagatgtgaatttgtgaactgtttctgcttatgttcgccagccactatttattgctggggaataattgcagctgcctgcgcaccgtagttggttgcacttgcagacgccgcaaaattgggattttatcgtgctagttttgttttttttttt

SEQ ID NO: 13847 - DNA, 379 bp, Zea mays
  unsure (1)..(379): unsure at all n locations; Clone ID: LIB3159-007-Q1-K1-B7
cgaacggagggaaagccagacagaagaacaggaggacacgcacaggggcacccgcaacccaaacgaggggggcgggcaagaccgggaggccgnccagcccagaaagaaaaaggcgaaagagganggacaagcgacaccagaagaaggggaagcagacgaagaaaagccgaacgacggacgcaagaaagggccagaaagagaaanaaagccgaaaagaaagcggcacaacgaagaagggcagcgaaagcacgaagaccgcgcggaagaaggagaaaaaggagcaccaaaagaacaagacacgagcagggagaaaaaaggaaggaaacggaggcaaaacaaaagggggcagcgcaggcncngccaccaacaaaagaaagga

SEQ ID NO: 13848 - DNA, 419 bp, Zea mays
  Clone ID: LIB3159-007-Q1-K1-B8
gctgaacttgctgctaaagaaggtccctatgaaacatatgaagggagccctgtcagcaagcacgttctccaacctgacatgtggcatgtagtgccatctaacagatggaactggccatctataagggagaccatttcaaaagttgggataagaaattctcttcttgttgctccaatgcccactgcttccactagtcagattcttggcaacaatgagtgttttgaaccctacacgtctaatatatacagtccacgcgttctaagtggggaatttgttgcgatcaacaagcatcttcttcatgatctgactgaaatgggcatttggactcctaccttgaaaaaccagataatatacgacgaccgctctgtccagaagatatcacaaatcccggacgatcttaaagcaatctacaaaacttg

SEQ ID NO: 13849 - DNA, 315 bp, Zea mays
  unsure (1)..(315): unsure at all n locations; Clone ID: LIB3159-007-Q1-K1-C1
tcctaatcatnacataccttactcatgaacatttttactctcacatattcaaccacaatccactctacgtttcttcactaaaaccggatgcctctcttctttttaaaaaaaataatatataccattttacaccttctccctaaaatttctttcctaactacaaacaaatgtatcattttctttatttttaactctaaaattattccaatcttaaaataatcctccaacaactacactctttattaaattcaatcacaccattttcaacaattataacaatttctaattctataactattacttatcatttagaat

SEQ ID NO: 13850 - DNA, 421 bp, Zea mays
  Clone ID: LIB3159-007-Q1-K1-C10
caagggcggacgcggagccggcggcggagcggagatggcggagaagaagcgaggcgcgggcactcgcaaggatgaggtggtgacacgcgagtacactatcaacctccacaaacgcctccacggatgcacctttaagaagaaggcaccaaatgccatcaaggagatcaggaagttcgctcagaaggccatgggtactactgatgtccggattgacgtgaagctcaacaagcacatctggagcagtggtatccgcagtgtgccgaggcgtgtccgtgtcagaattgcccgcaaccggaacgatgaggaagacgccaaggaggaactctactctctggtcacagttgctgagatcccaccggagggtctcaaaggtttgggaactaaggttgttgaggatgaggattaagccctgtataccatg

SEQ ID NO: 13851 - DNA, 449 bp, Zea mays
  Clone ID: LIB3159-007-Q1-K1-C6
ggtcggccgacgcgtacgggttttctctcctccgccgccgccaccgtcgtttccgcaacaatgccgtcgcacaacagctgccggatcaagaagaagcgtggcgaacaacatgctccagaaccgccccatcccctactggatccgcatgcgcactgacaataccatcaggtacaactccaagcgcatgcactggcgccgcaccaagctcagcttctgagcgtcaggataggccccctgctgcgtctgaaggctatggtctaagagctatctaccttctgatctatcaatgtgtcagttcttctgtaaactatcacttgttgctatgacgcttttattaagattctgctgatcggtgatgtcaagagaaaattgtcactactgtggtagaccccaagattccttgcagcattgctatgctaagtaaagaaccctgtatctattatatatgt

SEQ ID NO: 13852 - DNA, 90 bp, Zea mays
  Clone ID: LIB3159-007-Q1-K1-C8
tcctcataacaaagacaatttcaaaatctgctagacacacacctattttccctacacaatgcctcaacttgtcccaccttcaccaccact

SEQ ID NO: 13853 - DNA, 425 bp, Zea mays
  Clone ID: LIB3159-007-Q1-K1-D2
ggcacgagggacgtcttcggcgagggccgcatcaccatgcgcaagaccgccgccaagcccaaggcggcggcctccggcagcccctggtacggtgccgaccgcgtcctgtacctgggcccgctgtccggctcacctccgagctacctgaccggcgagttccccggcgactacgggtgggacaccgcggggctgtcggcggacccggagaccttcgccaagaaccgcgagctggaggtgatccactgccgctgggccatgctcggcgcgctcgggtgcgtgttcccggagctgctcgcccgcaacggcgtcaagttcggcgaggcggtgtggttcaaggcgggctcccagatcttcagcgagggcgggctcgactacctcggcaacccgagccttgtccacgcgcagagcatccttgctatctgggc

SEQ ID NO: 13854 - DNA, 406 bp, Zea mays
  Clone ID: LIB3159-007-Q1-K1-D5
cgagctctccatgggcgcccaggcccaggccgccggcggctcaacgactgcggcccaggaggttcacagctagcgccagacagagcgagaggcggtggtggtacacgcctactggcctcggtgatgggctgggctcgtacgtcagccaggcgtgagcgtgacaggccgtcgtccgtttctgccatcccatggtcggctcccatcctatgtggaatgaagagaaaggtgggggtagctattcgatcgatttggcgcgtgctttgtttgcttgtgctttggcgccatatcgatgcagagctgctgcacgtaaccatttttcgtctggggggtgtcacaccctcctgggttgcttgctacttgttacttgccgccattaccaaaccttaattgcttgctttcacgtttt

SEQ ID NO: 13855 - DNA, 236 bp, Zea mays
  Clone ID: LIB3159-007-Q1-K1-E11
aaaacccgggcggacgcacgcatccgcaagatcttcaccaccatcctcactatcatattcaatgttgaaactgtactctataagggcattttctccactgggggggactcttctggccactacatctatcacgcccctgtttatgcactactttcataacacacatgtacttattcttgttgtatacatcatctacacgaaaccttttgtttatgctactaattatctcctcatta

SEQ ID NO: 13856 - DNA, 392 bp, Zea mays
  Clone ID: LIB3159-007-Q1-K1-E2
cctaatctgatctaatggctgacggccaggacatccatccaagtgtttgttacaatgggggtggcatgcccaaagctggttctgctggttactatgcaccaagggctgttttcccaatcattgttgaacgcccacttcacactgtcgtgatggttggcatggggcataatgatgcgtatgttgtcgatgatgctcattccaagatgggtatcctgactttgaagtacccgatcgaacatggcattgtcaacaactgggatgatatggagaagatctggcaccacaccttctataacgaactccgttttgcgcctgaagagcaccctgtgcttctgaccgaagccccacttaacccaaatgcttacatggagaagatgacccaaatcatgttt

SEQ ID NO: 13857 - DNA, 275 bp, Zea mays
  unsure (1)..(275): unsure at all n locations; Clone ID: LIB3159-007-Q1-K1-E3
cgcgtccgacatcgagcacaatctattaacaacacatgccctacctctccgcctccgcggcactccccgcaggtcgtctctacaaagcgggccgcctctcattcctncgccattttatcactccacttcctgagcctccgctccttctcctgctcctgctcacgcgctctcttttctttcttcttcataactgtgacgtcgtactcacttatgatcatgatcatattcatactcatacggcaccgctgacattctactaactgctcgtgatctcg

SEQ ID NO: 13858 - DNA, 425 bp, Zea mays
  Clone ID: LIB3159-007-Q1-K1-E4
ggtcgcggacgcgtccgggtcaacagctcggccaccgcgttcgtgctgtccacgggcgggttcaccggcaacccgttgcggaactacacggacgtgctgatcccgtccttcatcacggcgcacccgctccgcggcgaggtccagttcctggtgagcagctacaagtcgtggtggatgaaccgctacatccagatcttccagcagatgagccggcacgaggtggtggacatcgacgcggacgacgaggtccggtgctaccgcagcgtggtggtgggggcgacgttccaccgggagctgggcgtggacgcgtccaaatcgccgccggggtactccacggccgacttccgcaagatgctgcgcgacgcgttctggctggagcgcgccacggtcacgcccagcggcgaccggtgggacatccggcgccg

SEQ ID NO: 13859 - DNA, 423 bp, Zea mays
  Clone ID: LIB3159-007-Q1-K1-E5
gaagaggacaaggagatgactctggaggaatttgagaaaataagagaggagaagaggaaaggactacttgcattgaaggctgaggagaggaaagttgaagttgacaaggatttgcagtctctgcagccactttcaaacaagaaagaaaatgatgaagttttcattaagctgggttctgacaaggataagaagaaggaaaatgctgagcgtgatgagcgtgccaagaagtcggtgagcatcaacgagttcctgaaacctgctgaaggagaaaggtactacggcggccgtggccgtggaaggggccgtggggatcgtggtggttttagaggcggatacggagggggatacagtcgtggcccagctgctgctgctccatccattgaagatcaagctcagtttccaagccttggtgggaagtgaaag

SEQ ID NO: 13860 - DNA, 442 bp, Zea mays
  Clone ID: LIB3159-007-Q1-K1-E6
ctcctagtgtttttgttccagaatctgtagcaaatggctgacggcgaggacatccagcccgttgtttgtgacaatggagctggcatggtcaaggctggttttgctggtgacgatgcgccaagggctgttttcccaagcattgttggacgcccacgtcacactggcgtgatggttggcatggggcagaaggatgcgtatgttggcgatgaggctcagtccaagaggggtatcctgactttgaagtacccgatcgaacatggcattgtcaacaactgggatgatatggagaagatctggcaccacaccttctataacgaactccgtgttgcgcctgaagagcaccctgtgctgctgaccgaagccccactcaacccaaaggctaacagggagaagatgacccaaatcatgtttgagactttcaatgttcctgccatgtatgtcg

SEQ ID NO: 13861 - DNA, 350 bp, Zea mays
  Clone ID: LIB3159-007-Q1-K1-E8
ctgacgcttgggttgctattcactctctcgatcctagctgtcctcccaagaatcgcagcagccattgtcatcaccacgcatgccttcgtcaacactcgccacctgcttgccgacgcctgagcgcctgctgctaaaccgctgcatctgagctcgcatctcacgctgccgtcgtctttcttccgcggaccggccccgctccgctgcgtccacatagtaggcggaggaggcgcccaatgtgttcgtagccccgcatctggaccccatttctccatacctgatcttatgtggaaacaatgtcgggctgctccttaattcacatgttgagtatttctacttcatcacgttgactt

SEQ ID NO: 13862 - DNA, 422 bp, Zea mays
  Clone ID: LIB3159-007-Q1-K1-F2
cggacgcgtgggcggcgtcggaggcgctgccgcggggccaggccatcggcgggtacatctgggggtgcaacaacgacactatggacgagaacctcaggagggagctgttcgggctgccgtccaggtacagggactctgtgcgtgctatccgcccgggactgcccctctttctctacaactactccacgcaccagctccacgggatcttcgaggccgcgagcttcggcgggaccaacatcgacccgacggcgtgggaagacaagaagtgccccggcgagtcgcgctttcctgcgcaggtgcgggtggcaacgcggaagatctacgacccgctggaggaggacgcctttcgccccattctgcaccactacgacgggcccaagtttcggcttgagctctttcgtaccgagggcctttgccttctt

SEQ ID NO: 13863 - DNA, 433 bp, Zea mays
  Clone ID: LIB3159-007-Q1-K1-F3
gcgtccgaccctattcctcccaatttcacacttccccatcaagaaaatccgcaaggattgcacctgccgaagcactccaacaatgaagagccctgaaaccatgcaaaatatccatgcctgcgagaactggctgccaagactggtgatgagcgcctggcgcatctgcggtatacttcacgccctgaaagggtggaccgtgcactagtgtggggacaccatggtgcattctgacaaaacatggtcagctgctattaggcacggattcaatcctttgactaaagcctgaaagcctgctaagcccagtgttctgtgactgctgcctgcgatagatatatgtacgcagatctcgaccccatttatacattgcttgaaaactacgatttagcaatcggtatcacaaaatctcccccgctaaaatattgctacttatatt

SEQ ID NO: 13864 - DNA, 317 bp, Zea mays
  Clone ID: LIB3159-007-Q1-K1-F4
ccgggcgaccgacgcgtccgggacgcgtgggctcaatttcaagcactgcctgttggccagtccatctcacttaacacctggggttgatcataagactctagggtccataaccttatatcctatctaccaggactaacgtccatgcaccatcactatctgctcgctttccgacgacaactatgtctattactgtacagctactgcatacaccatacctacaagaaaatgaaccgaccaaagcccgaatcctcctattatcaattgaagatggaagtatgcattaattgcccagaaagaaccaattgatcatctattcg

SEQ ID NO: 13865 - DNA, 444 bp, Zea mays
  Clone ID: LIB3159-007-Q1-K1-F7
gccgtattcgtcccaatctcacagttccccatcaagaaaatccgcaaggattgcacctacgggagcactccagcaatgaagatccctgaaaccatgcaaaatatccatgcctgcgagaactggctgccaagacgggtgatgagcgcctggcgcatcggcgggatacttcacgccctggaagggtggaccgtgcacgagtgtggggacgccatggtgcatgctgacaaagcatggtcagctgctattaggcacggattcgttcctttgacgaaagcctgaaagcctgcgaagcccggggttctgtggctggggcctgcgatagatatatgtacgcagatctggacgccattcgacgatggctggaaaactacgtttcagcaatcggtagcacaaattctcccccgctagagaaggcgacttatatggtcggcgtgatgaatgacg

SEQ ID NO: 13866 - DNA, 317 bp, Zea mays
  Clone ID: LIB3159-007-Q1-K1-F8
cgcaaacatacacgtatttctgcacgccgtcctggcaaggaagcggaagatgcaactgcggtgcccacacatgcaatggtggatgagacagccgcacgctgccttctcgcctgacgcaaacggtgcgcaaatatgagtcgcgaaccccttgccgccgtcacgggatactaagagatggagatgatcaacgatctgcctgaaggactgacgcgatacatcaagcgctacctctgcctcgagctggttaaacacgctccgctgttccatggcatgaacgatctgatcctggataacatctgcgaccggctgtggccact

SEQ ID NO: 13867 - DNA, 382 bp, Zea mays
  Clone ID: LIB3159-007-Q1-K1-G1
cgggccgaccgacgcgtccgcttcggctcctcccctctagctcatatcctctcacctacaatggccaccgccatttcctctctagtaactctctagaccgtacaccgccgatgccaggcccctgcctgattcttcgtatacctgtgcacccctatccgtatttacttccggccccacgccgtgcctaatgtgtcccgccgaagctcggacctgccactatcctcctgaccccatgtgctatacgcaccaaacacggtgacctcccataagctctacatgcggaatattcacaagaccgttacaaactacgagctccgcgacatgttcgctgcgcactgcaacatatatctgtccgcggatatgtacgacaagtatacaaatc

SEQ ID NO: 13868 - DNA, 417 bp, Zea mays
  Clone ID: LIB3159-007-Q1-K1-G10
tgaaggctctcggcacaggcatcctccgccgctccgcgccgcactggtccacagccgcggcttccttcttttccccacccttccgcccccgccgctgccgtcgcgcgcccgctcctgcagccgccgcgcgtaccccgcggtcccgcgcgagtgccaaggcccgggcgaagctcctggcggaggttgaggcccgggacccctggctcgcctccctctcgctgcttccgaccgacgacatccccagtgctgacgccaccaccaacgggtgggtgattggggtggatcctgacattggaggcgccatcgccgtcctctcgcctgacggctcgtctcaggtgtttgacaacccgttcgtgcacattgtggtgtcagaagtcatccgtaagcgactggacaccaagtcaattatccaactgc

SEQ ID NO: 13869 - DNA, 422 bp, Zea mays
  Clone ID: LIB3159-007-Q1-K1-G11
gcggcgaccagcctcaacttcgccacgttcctccaggtgcagggcaagtaccaggagcgggccccgcttccgttcgtgcctggatccgactactctggcgtggtcgacgcagtcggtcccggcgtgcgtgggctccggcccggcgaccgcgtctgctcctttaccggcctcggttccttcgctgacttcatcgtcgccgaggagaagcagctatttttggtgcctgatggatgcgacctggtcacagctggggctttaccagttgcatttggtacatcacatttggcccttgttcaccgagcccaattgaaggctggccaggtgctacttgttcttggtgctgctggtggtgtcggggcatctgctgtgcaaataggaaaagtttgtggtgctgttgttattgcagttgctaggggggctgg

SEQ ID NO: 13870 - DNA, 436 bp, Zea mays
  Clone ID: LIB3159-007-Q1-K1-H1
gaccaatttccttgcagagagtactgttttggcgatggacgttgccttaagcaccattgtgtgggtcatcgccattttcatcccggcactgctgacgctggtgcaaagaagccgtagccggcacgccggccataacccaccacctccgccggagcccagagccattcccctggtcggccacctccaccaccttctgagaaagaagccactccaccgctgcctcgcccacctcgctgagcgccatggagacgtcctggggctccggttcggttccagccgagtcgcagttgtgtcctctgcctcagtcgcccagcagtgccttgtcgcactggacacctcgttcggcaaccgtccacggctgccgtccgcgaggatcctctcctatgagtggtcgaccatgggccattccaactgcgggccgtactggcgccaagct

SEQ ID NO: 13871 - DNA, 430 bp, Zea mays
  Clone ID: LIB3159-007-Q1-K1-H11
cgcgtccggcgtaaacgccgccggggaccaacccaggcgaccggggtgcctagctcgccgtttcttgtggccttctcctcgcagtgggttaggatcaacgccctactacacgacgggggttttccccttcggccgccactccgtcctttcgcagcctgccgccggcgccatgctgtacatcgtgggcctcggcctgggcgacgagcgcgacatcactgtgcgggggctcgatgccgtacgcagctgctccaagatatacatggaggcatacacatcccttctttccctcggcctcgacccggccgcgctcgccaacctggagaagctgtacgggaaggagataacggtcgccgatcgggagatggtggaggagcgtgtcgaccaggtgctaaacgaggctgccgacactgacgtcgcctttcttgttgtt

SEQ ID NO: 13872 - DNA, 419 bp, Zea mays
  Clone ID: LIB3159-007-Q1-K1-H12
atcatggggctatctgttatccccttcatcatcgctcagttcccaaagatgttgaagagccaccacgggcagcgtctagctatgttgctggccctcattgtgtcattcttgctcgtgctttcctactgtctgtatcaggttttccagccttggattcagaggaggaagcttgcatacgcaaagcacaagcacgtgatctctgggatactgaggcacgcccagatgcagtcactcggccgtctgctaaacgatgatggcacgcccaatgacgacgtcatcagaaagctgttccgcaagatcgacatggaccagagcgaatccctgtcccgtgctgagctgcacgccctcatcgtcggtatcaacttcgaggaggttgactttgacaggacggatgcggtggacaaggtcatggacgactt

SEQ ID NO: 13873 - DNA, 438 bp, Zea mays
  Clone ID: LIB3159-007-Q1-K1-H3
gggtagaatagccgggacgcacgcctcctgacgagaacttgacagtagacaacagagatatttactggaagagcgatagggaacataaatgggggaaatatgtctatccgagcagcttccacaatggctcacttaaaggtggagcaacacttgacccaaagatcccgttgagtgagcaagaggatctcaacgcttggatgcggactgcagcacttactacattcagaaagttatatgggagaatatacattgacctcaaggagaatgacacaataacagcgacattgaataacaactacaatacatatagcttcggtggcaagaaaaagctggtcctctccactgcaacttggcttgaggggaagaacgattttcttggctttgcataccttatagttggcggactctgtattttcctggcatttgcattcaccttgc

SEQ ID NO: 13874 - DNA, 406 bp, Zea mays
  Clone ID: LIB3159-007-Q1-K1-H5
ggggagccgaggcgtctcggaaatgcggctcttctggcgctcatgctctgctccgtcgtcgcgctctccctcatccgggggagattcgccccaattgtcactaccgcaggagatgccatcaaatccgaggacgacgctgcggcggctgcgctcagggtcagcaaggcggccgtcaacgttgacaccggcgacagcgccgacgaggccgccgccgaagctgctgctgaggagaaagagaaggaggaagtccatccgaagcccgctgacggttccggctccggttccggcggcagcgcagccaagccggtgtgctacgagacgagccgccgctccgacacctgcgaggcggctggcgacgtgcgcgtcgtggggagcacccatactgtgtacgtggactcgctggacc

SEQ ID NO: 13875 - DNA, 451 bp, Zea mays
  Clone ID: LIB3159-007-Q1-K1-H6
cccagaaaaaagtccgaacgcatctcttctttctactttcttgtaacccaagacgaactcggtgaactctttctcctcgcgcagcaccggagcacaatcaaggattccagtccagtcctgccaatggagtgcgttttgggcttggttggccgcgacttcgcggtggtggcggccgacacctccgccgtgcagagtatcctcgtccacaagactgacgaggacaaagtaatggtcctcgactcgcacaagctgttgggcgcttcaggggagcctggtgaccgggtgcagtttacggagttcatacagaagaacctccacctgtaccagttccgcaacaccatcccgctgtcaaccgccgctgccgccaacttcacacgcggcgagctcgccacagcccttcgtaagaatccatacatggtcaatgttattctcggtgggtacgataaggatg

SEQ ID NO: 13876 - DNA, 445 bp, Zea mays
  unsure (1)..(445): unsure at all n locations; Clone ID: LIB3159-007-Q1-K1-H7
gagaacttgacagtggacaagaaagatatttcctggaagagcgatagggaacataaatttggtaaagatgtctatccgagcaacttccagaatggcgcacttaaaggtggagcaacacttgacccaaagatcccgttgagtgagcaagaggatctcatcgtttggatgcggactgcagcacttcctacattcagaaagttatatgggagaatatacattgacctcaaggagaatgacacaataacagtgacattgaataacaactacaatacatatagcttcggtggcaagaaaaagctggtcctctccactgcaacttggcttggggggaagaacgattttcttggctttgcataccttatagttggcgggctctgcattttcctggcatttgcattcaccttgctgtacttcgtaaaaccaaggaaactgngagaccacaact

SEQ ID NO: 13877 - DNA, 407 bp, Zea mays
  Clone ID: LIB3159-007-Q1-K1-H8
cgcgtccggccagaaaaaaggccgaacgcaacgcttctttctactttcttgtaacccaacacgaactgggggaactctttcttctggggcagcaccggagcacaatcaatgattccagtccagtcctgccaatggagagcgttttgggcttggttggccgcgacttcgctggggtggcggccgacaccttcgccgagcagagtatccttgtccacaaaactgacgaggacaaagtagtggtcctcgactcgcacaagctgttgggcgcttcaggggagcctggttgaccgggtgcagattacggagttcatacagaagaacctccacctgtaccagtgcctgaacaccattccggtgtcaaccgccgttggcgtcaacttcacacgcggtgagctcgccacagccct

SEQ ID NO: 13878 - DNA, 204 bp, Zea mays
  Clone ID: LIB3159-008-Q1-K1-A1
aactcgtatgaatagaaactagatctgaatgacaaagtaaacgttgacgctagcaaaatacgcgcgggggtcaggcccatattctgtatcataaaacatgctgaacccaaatggtggaagaaactcgttcgagatgatcaaaggacacctcactctgtgaaagctgatcgttacacatggaatgatcaagaagatgatcgtgct

SEQ ID NO: 13879 - DNA, 342 bp, Zea mays
  Clone ID: LIB3159-008-Q1-K1-A10
cctactatcctgcctgctgccgactacggcagtggaagctctcgtgattgtgctgctaagggcggcgtgctgtatggagtgaaggctgtgataacaaatatcttcgagaggattcaccgcagcaatcttgctggcatgggaatcatccctctatgctacaaagcaggggaggatgcagacaccctgggcctaaccggccatgagcgctacacggtccaccttccaaccaatgtgagtgagatcaagcctggccaagatgttaccgtgacaactgataatggaaagtcgttcacttgcacactcaaatttcacactgacggggagcctgcttactaccatcat

SEQ ID NO: 13880 - DNA, 434 bp, Zea mays
  Clone ID: LIB3159-008-Q1-K1-A12
gtgccacttgaagtactgcacttgatcatgatactggacctgctggccctcatgactgcggtttgctgctggaagctgcagaaaattcaggacttcagtctatgtgtatggtctagtgctcggtgtcgtggtataccttgtgatcgcagttcttttgtcaagtggcattgcaaaatgtctgagacccatggatagaaatagggtttcctctcagagaagtcctattcgcgctcctacagcaagcacaaggatacttggagaccatgcttgatggttccattcctttggtaatagtactagtttaatagtagtgtatgtatttggctttttaatgtaccttatgttgtgggagtttgaaattgacctgaaattcgacgctttatggtgttcatttcttttagaatgtaaaatcagtgccaatcatgaatctacat

SEQ ID NO: 13881 - DNA, 254 bp, Zea mays
  Clone ID: LIB3159-008-Q1-K1-A2
gcaagcggcagcaaggcgttggcaatcccagtccagtcgtcggagcactcgcaatttcccgtcacagctggccaccgccccaccctcacggcctcacctcctcccgctacacgcacgcgcccacctacccaaaacgaccgcgcgcggcgccctcctcccgcggtgccaccaccaccaccacctcgtcggaccatcaccacgccgatcggcagctaagcagctcccgcccccagcaccgcgagctgcgatggaat

SEQ ID NO: 13882 - DNA, 255 bp, Zea mays
  unsure (1)..(255): unsure at all n locations; Clone ID: LIB3159-008-Q1-K1-A3
gtccctcacacactcactatacactgctctgctgcagcaagaaggaagaagctagcgccgccctagctctcgttgtcagcaatggccaccaccgccgcgtccagcctcctcaagtcctccttcgcgggctcccggctcccttcggccacgcgcaccaccaccccgtcgtccgtggccgtggccaccccgcgcgccggcggcggccccatccgcgcgtncatcttctcctnccccaccccgccctacgacctgacg

SEQ ID NO: 13883 - DNA, 399 bp, Zea mays
  Clone ID: LIB3159-008-Q1-K1-A4
cggccggaattccggtcgcccaccccgtccgattttcctggctggggccgagtacgggagtggaagctctcgggattgggctgcaaagggcccaatgctgcagggagtgaaggctgtgatagcaaagagcttcgagaggattcaccgcagcaatcttgctggcatgggaatcatccctctatgctacaaagcaggggaggatgcagacaccctgggcctaaccggccatgagcgctacacggtccaccttccaaccaatgtgagtgagatcaagcctggccaagatgttaccgtgacaactgataatggaaagtcgttcacttgcacactcagattcgacactgaggtggagcttgcttactacgatcatggtggcattctaccatatgtcgctagaaa

SEQ ID NO: 13884 - DNA, 193 bp, Zea mays
  Clone ID: LIB3159-008-Q1-K1-A5
actgtctcgtgtggccgccgtctcccgagcggaacgtctagccatcgctctggcgaaggggcccccatgcgaggagggaaggcgccgataccagacaacaagaagacggataacgtgacgaaccctgtattcgtgaagaggccgaatctatgctgcatcggcggcgcggaggcgcacacgaatgacctgcacc

SEQ ID NO: 13885 - DNA, 152 bp, Zea mays
  Clone ID: LIB3159-008-Q1-K1-A7
gaataaccgggtcgaccgacgcattcgtacttgagaaagtagaaatttgaactcccataccaaccaacagattacgctcatttttccggcgcaaatgttcaaccacccaaccttaacggcctaacatcctcccgctaaagcacgcccccaac

SEQ ID NO: 13886 - DNA, 172 bp, Zea mays
  Clone ID: LIB3159-008-Q1-K1-A8
atcgtacgtgagcccggccgagcgagagcgagggagaggcatggctgctccgaagcgcgcgacgctggcgctggccgtgctcctggcggcgaccgtggtggctcccccggccgcggtgcgcgcggcgatgtcgtgctccaccgtgtacagcacgctgatgccgtgcctgccg

SEQ ID NO: 13887 - DNA, 357 bp, Zea mays
  Clone ID: LIB3159-008-Q1-K1-B11
taattattgccctttcagttcgccatcggcagccgagcaccatgagctccacaggcggcggcgacgatggcgccaagaagtcttggccggaagtggtcgggctcagcctggaagaagccaagagggtgatcctgtgcgacaagcccgacgccgacatcgtcgtgctgcccgtcggcacgccggtgaccatggatttccgccccaaccgcgtccgcatcttcgtcgacaccgtcgcggaggcaccccacatcggctgagggttaaatctacaaaatgaaatgactggacatgccatgcgtaccttgtccggcgcgaataatggatgtgtgtgtgcttcgatcgttcctataagttgct

SEQ ID NO: 13888 - DNA, 332 bp, Zea mays
  Clone ID: LIB3159-008-Q1-K1-B2
gtcaggcatccggagtcaaatgggctcgttgaaagagccaatggcattataatgataggggtaatgaaattaatcttcaatcaacccaggggaaagtggccagatcagctaaccaaagtggtgtggagccacaacacaacaacatcaaggtctacaggctttactccattcaagttattattcggtgacgaagcaataactccggaggaagctaaaactggatcaataagagtagtagcttcggcagaatcaggttctgaagatgcttattctgtggaaaaagatgctttagaaaggatcaagctttaagcttgggagaatatcaataaata

SEQ ID NO: 13889 - DNA, 330 bp, Zea mays
  Clone ID: LIB3159-008-Q1-K1-B3
tcgccatcacataaaaccagtgcaagcagaagcagcgcaatggcgagcagcaccatgggcgggtcctccacagccttcgccggcaaggcagtgaacgtgccgtcgtctctcttcggcgaggcccgcgtgacgatgcgcaagacggcggcgaaggcaaagccggcggcgagctccggcagcccgtggtacggccccgaccgcgtgctctacctgggcccgctgtccggcgcgcccccgagctacctgacgggcgagttcccgggcgactacggctgggacaccgcggggctgtcggcggacccggagacgttcgccaaaaaaccggagctg

SEQ ID NO: 13890 - DNA, 441 bp, Zea mays
  Clone ID: LIB3159-008-Q1-K1-B5
gcgtacgcgctttcagccgccgccgcgttcgcctcgccaagcgcagcagccgccgcagcacatcgggcgggcgatctcagccatggcggaggtggagcatcaacaggacacgccgaagctcttcaaccgctggaccttcgatgatgtccaggtgaacgacatctcgctgaacgactacctcgctgtgaacgcgacgaagcacgcgatgtacctgccgcacaccgcgggacgttactccaagaagcggttccgcaaggcgcagtgcccgatcgtcgagcgccttacaaactcgctcatgatgcacgggcgcaacaacggcaagaaggtcatggctgtccgcatcatcaagcataccctggagatcattcacctgctcaccgatgccaaccccatccaggtcgtcgtcgacgcgatcattaacagtggacccccgtgaggatg

SEQ ID NO: 13891 - DNA, 295 bp, Zea mays
  Clone ID: LIB3159-008-Q1-K1-B9
ggcaaagccctccactacaagggaagtaagttccacagaatcatccccagcttcatggggcaaggaggtgacttcactctcggggacgggaggggtggtgaatctatctacggcttgaagtttgcggatgagaacttcaagatcaagcacactggtccaggccttctgtccatggccaatgccgggagagatacaaacggatcccagtttttcatcaccacagtgacaacaagttggttggacgggaagcatgtggtgtttggcaaagtgatatctggaatggatgttgtgtaca

SEQ ID NO: 13892 - DNA, 320 bp, Zea mays
  Clone ID: LIB3159-008-Q1-K1-C11
ctagatgcctctgctggaagttgcttgtacttgttccaaccggtatggaatcccaggcgcgacagttttgtctcaaaatggttacttagaaagctcatgggttatggaatcagagatattggattggttgtttcttcagcaggcctatcaatttggacagagtggatcagttttccaaatgcatgttgtttgtctgttgttagggccagcgatcaacaagttattgataatgatattgctaacaatacaagctggatagtatttgtagtgtctgaagcatttcatgggaaatgcagaaggaacggtttaacagtctttta

SEQ ID NO: 13893 - DNA, 417 bp, Zea mays
  Clone ID: LIB3159-008-Q1-K1-C12
tcccctccgagcctcagttcgcatccacgcgcgccgccgccgcctcgacgctcaccgggcggccatggcggaacagactgagaaggctttcctcaagcagccaaaggttttcctcagctcaaagaaatccggcaagggtaagaagcctggcaagggcggcaaccgattctggaagagcattggccttggcttcaagactcccagggaagcaattgaagggacctacattgacaagaaatgcccattcactggaacttgttctatcagaagcagaattattgctgggacatgccacattgctaagatgaacagaactatcattgttcgcaggaactaccttcactttgtaaagaaataccataggtatgagaagaggcactccaacatcctgctcacatcttcccaagctttcgtgtg

SEQ ID NO: 13894 - DNA, 379 bp, Zea mays
  Clone ID: LIB3159-008-Q1-K1-C3
ggctcccactccccccctaccggctaccctacccatcacacacaaacagccactcctcacggcccccgtcctccggttcatgtcctgctgctccccatgtcgcccccactcgacctcgactacataggcctctcgccggcggcggctgccgccgctgcccacgacgacctgaagggtaccgagctccgccttggtctgccggggtccggttcgccggaccgccgtgttgtggctgccaccgcaaccaccctggacctgctcccggctaagggcgccaagcgcgggttttctgacgaggcgccgacgccatcgcccggtgcagcttccgggaagggaaagaaagtagcggaagaagaagacgacaagaaagttgcagcga

SEQ ID NO: 13895 - DNA, 255 bp, Zea mays
  Clone ID: LIB3159-008-Q1-K1-C6
gcggaggagtttctgtgccaagccacaatgggtatttcccgtcagcttttttcacaagcgcggggccaccttttgaaagcataacgcctggaggaagaagcgaatgtatgagcttggtcgctagtcaaccaacaccaagttgtcaagcattaatacagtgatgagggtctctgtttctgaatgtaatgtgaaatggagggctctttctcttgatactggttactacttatggagaagtgaatcttttactctcaa

SEQ ID NO: 13896 - DNA, 315 bp, Zea mays
  Clone ID: LIB3159-008-Q1-K1-C9
ggaaaacccggggcgagcgacgcgtgcgcggacgcttgtgccacccacttctctttcataacaacgcctgaggcgccctctctccgcctctactaaaaagcccaggtcgtcttctatccctatgtcggcgagccatgggacactttatttggtatgaaaggatcaatgtccaatcatgattattatcacgagcactataaggaggactgaagacgactatgatcatggatgattctgctgatgacatgttacactaacagctatgggttatggattacgatgcgcgggataatgattatggacaacccaaagaca

SEQ ID NO: 13897 - DNA, 428 bp, Zea mays
  Clone ID: LIB3159-008-Q1-K1-D11
cttatgccaccaatctgcaagtggatactctcggtgcttagcaaggccgttgggaaggccgtttcctctttagaagcatataagttgtctgacgcaacatctgctatatactcatggtggcagtatcagctatgtgatgtatttatagaagctatcaaaccttacttcttcaacgattctcaagagcttgaatcagcaagagctgcctccagagataccctgtggatttgcctggatactgggctgcgcttgctccacccattcatgccctttgtaacagaagagctctggcagcgtcttccacagcccaaagaatcttggttggaaaggtcgattatgatttcacaagatccatctcttgttgaggaatggagtaatggcagacttgaaaatgaaatggacatcgtcttggatgctgtgaacaaaat

SEQ ID NO: 13898 - DNA, 333 bp, Zea mays
  Clone ID: LIB3159-008-Q1-K1-D12
ttattattgccctttcagttcgccatcggcagccgagcaccatgagctccacaggcgcgcacgattgcgccaagaagtcttggccggaagtggtcgggctcagcctggaagaagccaagagggtgatcctgtgcgacaagcccgacgccgacattgtcgtgctgcccgtcggtacgccggtgaccatggattttccgcctaactcgcgtcgcatctttcgttacactcgtacggaggcaccccacatcggctgagaattaaatcttataaatgaataaactcggtacatgtcatgccttcattgtccttcccgaataatggatgtgtgtgctt

SEQ ID NO: 13899 - DNA, 390 bp, Zea mays
  Clone ID: LIB3159-008-Q1-K1-D4
tgaattcaccatgctggaacttgctgagaatgtgaaggagttgattaacccagatataagagtgacgatgaccgagaacactcctgatgatccccgccagaggaagccggacatcaccaaggcaaaggaagttctagggtgggagcccaagatcgtcctgaaggacggcttggtgctcatggaggatgatttccgggagcgcctggccgtgcccaagaaaaccaaagcctaaactgccctgcggtgggcgaagaatatccacgggggagcatactcatagttggcttgtcattattcgtggccacatttcattacggaatttgagttccaataaacggaatataccttcgtcgatcaccttgaaggattgtatcattagaattttcatac

SEQ ID NO: 13900 - DNA, 431 bp, Zea mays
  Clone ID: LIB3159-008-Q1-K1-D5
tatgaagaggccactgaggtgcataaatatgagtccagcattcgacgggaaacggaagcatttgaatctttgatcagacagaagtccctgatgatgatacctgttgatcaggatggcagttgcattggaccaactgttgcaaatgaaccagagcctcctatatgtcagaactcaattacaagaaaggcaggtggtaaaaaggcgcccgagaaggagatgcaggttattgtagacatgagagagttcatgagcagccttccgaatgtattacatcaaaaaggtatccgaatcgtaccggtcacccttgaagttggtgactatgtgctctctcctttgatctgtgttgaacggaaaaatattgcggacttgttccaaagctttgcttctggtccgctgtacaatcaggttgagacaatggcacgttactacaa

SEQ ID NO: 13901 - DNA, 379 bp, Zea mays
  unsure (1)..(379): unsure at all n locations; Clone ID: LIB3159-008-Q1-K1-E1
ggccaatttttgtccaaagataactgaagggtgttgtggcgcatgtgttccggctagtattaatcttctccccagtccctagatcgatttgcttaagctggtatgtgccaccccctgtgctggtgaccacgcgtgcagttctcccacctcgccatggctcggacgtccttaggagttgctggcccgtatgaagcttgttccgtaatcatctcagagctcccaaaataaagagcgaagattcaagatgaagtggttgctaaagaggactctactccaatgcctgcttaatcaagtggatggagccatctaactggngtttaaatagagggatttagacctncgtctccgcaacaaaaggtgttgaggagtactcaaagtg

SEQ ID NO: 13902 - DNA, 266 bp, Zea mays
  Clone ID: LIB3159-008-Q1-K1-E10
gcaaccggtccagcactttcacgctcagctccagcaatggctgcctccaccatggcgacggtgctccacggcgatggccggcacccccatcaaggtgggctccttcggcgagggccgcattaccatgcgcaagaccgtgggcaagcccaaggtggcggcgttcggcagcccctggtacggccccgaccgcgtcaagtacctcggccccttctccggcgagcccccgagctaccttaccggcgagttccccggcgactacggctggg

SEQ ID NO: 13903 - DNA, 396 bp, Zea mays
  Clone ID: LIB3159-008-Q1-K1-E12
gtgcgagactctactgctcgatcgccatggccgccgcgctcaggtgcccggcctccgggagggtctcgggccccgccgccgcggggctcgccaaggtgcgccaggcgtccagagtcgtcgcggtgagcggggcccggcagagccgcggcggcggcgtcgccgtgcgggcgtcgctgttctcgcccaagcccgcggcggccaaggacgcgcggccgaccaaggtgcaggagctgtacgtgtacgagatcaacgagcgggaccgcgagagccccgcgtacctgcgcctcagcgccaagcagacggagaacgcgctgggcgacctcgttcccttcaccaacaaggtggacaacggcagcctggacaagcggctgggcgttaccgcgggcatttgcgtgc

SEQ ID NO: 13904 - DNA, 334 bp, Zea mays
  Clone ID: LIB3159-008-Q1-K1-E3
gcggcggcaccggcaggcggcggccctcgggcattgtcccagcgggagcaggacatccaggggatgctcgccgccgatgtccacctcggcaccaagaactgcgacttccaggtggagcgctacgtgtacaagcgccgcactgatggtatctacattattaaccttggaaagacctgggacaagcttcagttggccgccagggtcatcgttgccattgagaatccgcaggacattatcgtgcagtctgctaggccctatggccagagggctgtcctcaagtttgcgcagtacactggtgcccatgccattgctggcaggcacactcctggtacat

SEQ ID NO: 13905 - DNA, 433 bp, Zea mays
  Clone ID: LIB3159-008-Q1-K1-E5
gttccgtcgtttcgtctccgctcctcacctcgccagccatgggcaagatcaagatcggagtcggggtttcggaaggatcggcaggctcgtggccagggtcgccctgcagagcgaggatgtcgagctcgtcgccgtcaacgaccccttcatcaccacggattacatgacgtacatgttcaagtacgacaccgtgcacggccaatggaagcacagcgacatcgccctcaaggactccaagacgcttctcttcggcgagaagccggtcaccgtctttggcatcaggaaccccgaggagatcccgtggggtgaggctggtgctgagtatgtcgtggagtccaccggtgtcttcactgacaaggacaaggctgctgcacatctgaagggtggtgccaagaaggttgttatctctgccccaagcaaagatgcgcccatg

SEQ ID NO: 13906 - DNA, 281 bp, Zea mays
  unsure (1)..(281): unsure at all n locations; Clone ID: LIB3159-008-Q1-K1-E7
ggggcactatacgttttcgcncgcggcgtggtcgtctcgtgccccgcccggtttttccaggccgaggccctccaccatgtccaacctctcgccctggatgctcacggttgccgccagcagcatcgaccgcgccttccacgcgccggtcaggctgggcaacggtgtgacggtcatgggtcaaaccgtgacaccgtaccagctccccggtgacaagccctatcctttggtttatgcggcagacgcagttgttcctgggactcccgctaatgttttcaaccaat

SEQ ID NO: 13907 - DNA, 470 bp, Zea mays
  unsure (1)..(470): unsure at all n locations; Clone ID: LIB3159-008-Q1-K1-F1
ccggccggattcccggtcgcccacgcgttcgcgtggacaccgggttcttggttaactgggttcaagggttccccttgcgtcgggtcgggccgccgccagtccggcccggtgttcaaccccaaggcgtccagctcctacgcctccgtgtcctgctccgcgcagcagtgcagcgacctcaccaccgncacgctcaaccccgccttctgctccacctncaacgtctgcatctaccaggccagctacggcgacagctccttctcggtcgggtatctgagcaaggacaccgtgtcgttcggctccaccagcgtgcccaacttctactacggctgcggacaagacaacgagggcctcttcgggcagtcggcggggctcatcggcctggcgcgtaacaagctgtcgctgctgtaccagctggcgccgagcatgggctactccttctnctactgccttccggacgtcgtcgtcgtcgt

SEQ ID NO: 13908 - DNA, 190 bp, Zea mays
  Clone ID: LIB3159-008-Q1-K1-F10
aaaacccgcccgcccacacctatcaaaaattatctttttactttcatcacttttatactttcacacctacatcaatccccccgccctttttttttaatatcaacccccattcctttatataatttccaaacactccctactacttacctaactaccaacctcactttctatcatcaatttttaaaccact

SEQ ID NO: 13909 - DNA, 321 bp, Zea mays
  Clone ID: LIB3159-008-Q1-K1-F11
ctcaaaacctcatgcacaagcttgctttttttcctcccccattaatctctcccctcccgctctttctcttccccatcagtctcgccgccatttccctgtcctgctgctgctactgctggtagtggttccccaaacccaagccttcgattcgcccgcccgcccgcccgcggtctcgagccagccttccgcgccgtcgcggttgctttacgcgcagctatccatggatgaggtccctgccaccgccgccgtcctcgacttccgacccggctcttctgtaccacgcgtttccgccgttccgcgccgtgccgtgcaatgcccccc

SEQ ID NO: 13910 - DNA, 357 bp, Zea mays
  Clone ID: LIB3159-008-Q1-K1-F12
ctccagtctcgctgcttccacaagtccacaaccgtaccagcaccaccgcgccatggcgtgctccgccgatcccgatgccgccacgccaccatccgcgccgcagccggagcccgcacggaaggcagtccgcgtggtggtgaaggggcgcgtcacgggggtggggttccgcgactggactgcgtccacggccgagtcgctcggcctcgccggctgggtccgcaaccgccgtgacggcagtgtggaggccctcctctccggagaccccgcgaagatcgaagacatgataacccgccgccttcccgtcggccccccagccgccaccgtcaccgtcgtcgtcccgtccacggccgagcccgt

SEQ ID NO: 13911 - DNA, 356 bp, Zea mays
  Clone ID: LIB3159-008-Q1-K1-F2
tccttttcccagacagacagactccctagtccccacacaccaccatttccccccacggcgcccatccgtccgtctccgtggctcgcctccacgccccgtaccggcgatggccgccgaggcagcgtgctgcgacgacagcgcctgctcgacgcccttcgtgagcgcgccgtccagccccgcccgggacagggacagggaaagggacacctacccgtcccacttcttcttcagcgcgccgaccagccccacccgcggcaaggacgccgccgtcccggacctggacttcgacttcgacttcgacttctcgtcgcgctttccgtcgcccgtcgccggcgtcatgtgctccggcgacgagc

SEQ ID NO: 13912 - DNA, 427 bp, Zea mays
  unsure (1)..(427): unsure at all n locations; Clone ID: LIB3159-008-Q1-K1-F5
aggagaaggaggaggacttcatggcaatgaagggctgcaagctgccacagaggccaaagaggcggcccaagctgatgcagaagtgcttgcttatggtgagcccaggagcttggttatcagatttgtcgcatgagagatatgaagttagagagaagaagagttctaaaaagagagctagaggcttgaaggctttgaccatggagagtgattcagagtagaggtcgaggcgaatgaatttttgggcttgacttcagctggtggcaaaaaactgtagtttaggtggcactgcctgctgcttatcagacaaacctcagcatctaatttggtgctatgagtgctctgatcaagatctattgatgtcaacagcaaagagcatgttagattcctgatctagtgggaaacctgcagctncatctgtgggcacctt

SEQ ID NO: 13913 - DNA, 318 bp, Zea mays
  Clone ID: LIB3159-008-Q1-K1-F6
gtactgcttaacgatcaatatgcctttgcaaacttagttaatttgccgcaggtatacctagagcgttgtccaaagattaatggtgggcttatacatttaaaaggcttgaaaaaactggaaaaactgaatctgagatactgtaatggcatcacagattcaaacatgaaatatttgtcagatctcacgaatttgagagagctacagctctcttcctgcaaaatatctgctttcggggtttcttatctgaaaggtttgcacaagctatggtatctaaacctgtagggctgtgcacttactgtagtttgtttggaggttata

SEQ ID NO: 13914 - DNA, 184 bp, Zea mays
  unsure (1)..(184): unsure at all n locations; Clone ID: LIB3159-008-Q1-K1-F7
cactgggcgatcnctcacctcttttcaatcctccccccccttcacctnacccggccatttttatagagaggagtactaccctaacataactaaataactcatattatgattattctctgtacaatatcacatacgactataccaacccacacaccataactctccccctttctttctttcacac

SEQ ID NO: 13915 - DNA, 322 bp, Zea mays
  Clone ID: LIB3159-008-Q1-K1-G10
gtgacaaaagcccacagatacttctccctactcctccagtccttcgtcatccgtttgccgcgctgcctccgccaccgtgcaaaaagctacctcctgcctgaaccgccccgacatggcgatgctatcccgcgcagcctcctccgcgggccggcgcccgctggtgccgccgtctatgcttttggcggtgagggcgaaggtcattgttctttttggccacatcgagcctgagcccaatgaccccatccttagcagtgaccaggcttttctcgccgaccccttcatcgacaaaaagaacgacgtgcgcggcgcctaccgggacgac

SEQ ID NO: 13916 - DNA, 343 bp, Zea mays
  unsure (1)..(343): unsure at all n locations; Clone ID: LIB3159-008-Q1-K1-G11
tgccattgctcaaggatgttgtccagtcaatggaagaagcaatcatagctagagaagaagccgtgctgatggtacgtttgaaaaggcaaggctccgatttgcacatgcagaaactgttgttccttttagctgccttcttggtctttttcttgaaggtccagaaattgagaagatacagagagaggaagcattggacctaccccctttgccgccacagggaagaaactggaaaggcagtgttgttgcgccttttgctggtaacaatatgctggntttatatcaatgttcaaacaaaatttcggatggcagcacaatctctggaggccgaaacaactttttactt

SEQ ID NO: 13917 - DNA, 427 bp, Zea mays
  unsure (1)..(427): unsure at all n locations; Clone ID: LIB3159-008-Q1-K1-G2
cggccgaannccggtcgcccacgcgttcgcgagggctttactttgggatggatgaattcctggaacccagggcttttggttggtccccggcaggataactttttggccagcttcttgctcgggtggggtataaccattggtgctggccttgcctcctaccccattgacactgttcgccgtcgcatgatgatgacatctggtgaggccgtcaagtacaacagctccttggacgctttcaagcagattgtcgcaaaggagggtaccaagtccctcttcaagggtgctggcgcaaacatcctccgcgctgtagctggtgctggtgtccttgctgggtacgacaagctccangtggttgtcttcggcaagaagtacgggtctggtggtggctaacgatgttaatgatgatgacgacaacaacaacatgatg

SEQ ID NO: 13918 - DNA, 316 bp, Zea mays
  Clone ID: LIB3159-008-Q1-K1-G3
cgtccggctgcgtaacaccgtgtacttgaagacgactatgatgaatatactgcaacaaacaacagcggtggtgcattttgccgctctatatttctgattttgatggcccttttgctcctgaggcatacactgaccattactaacagcgatgatgaagatgatgcatctgctattttctcgctatttcttttgagagcggctggatttttgctgccatgctatattatggcttgggctattagtatcatgcatcgtcaaagacaaagacaggaagaagcaatgctattaccaacggaagtggcgatcattctgcatc

SEQ ID NO: 13919 - DNA, 276 bp, Zea mays
  unsure (1)..(276): unsure at all n locations; Clone ID: LIB3159-008-Q1-K1-G4
tttttnnatnttttttttttttattttttttttttccttcttcttttttttattcggcgcgtttttttttagaacaaggggggttttttttgctcccaataataaacctctcacatttttatacataccccgcccacaatattataccccttaaggttttggcaaaaataatgtcagtgcaaaacaaaaaattcaaatgcccttgtaacatgtttagagaaaaaaaaaaaacactttctggttaggggagcaaactttttctgaaagcaccccaat

SEQ ID NO: 13920 - DNA, 265 bp, Zea mays
  unsure (1)..(265): unsure at all n locations; Clone ID: LIB3159-008-Q1-K1-G7
gacgtctttactttgatatttattattctctgaaaccaacgcttcttgttggtacccccgcngattactacatcggccagctccttcctcttatccagtataaccattagtgctggccttgtcttctaccccattaacactgctcgccttcgcatgatgattacatctggtgaagccctcaaatacaacaactacttttacgctttcaaacacattctttcaaatgaaggtaccaaatccctcttcaaaggtgctggctcaaaca

SEQ ID NO: 13921 - DNA, 203 bp, Zea mays
  Clone ID: LIB3159-008-Q1-K1-G8
ggtctttactttggtatgtattatttttttaaaccactgcttcttattaatacccccgccgattatcttattagccagcttctttcttcaatagaatataaccattgatgctggccttgcctcctaccccatttacactgttccccctcccatgatgatgacatcttgtgaggccgtcaaatacaacaactccttggacgctt

SEQ ID NO: 13922 - DNA, 396 bp, Zea mays
  Clone ID: LIB3159-008-Q1-K1-G9
tgagaagattgctaaccgtcttgatcgagtggtagctgacttggggagaaaacctcctgcggttttggtccaagtcaacactagtggacaagaatcgaaatttggagtagatccctcacgatgcatggtactagcaaagcatgtcaaactgaactgcccgaaccttgtgttctctggtctgatgacaattgggatgcttgattactcctcaacccctgagaatttcaaggcgctggctaactgccagcaagaggagtgcaaggagcttggaatactcgaagagcactgcgaattgtctatggacatgaccgctgattttgaacaagcgattgaaatgggaaacacaaatgttagcagttggtcaaccatatttggtgcaagaaaatactcaaagaa

SEQ ID NO: 13923 - DNA, 416 bp, Zea mays
  unsure (1)..(416): unsure at all n locations; Clone ID: LIB3159-008-Q1-K1-H10
atccaattgtcacttgctctccctccaattagctaattaaggccggtcatccctctgctagctcgtttcattatccatggcggaggagaagcaccaccaccaccacctgttccaccacaagaaggacgaggagcagctcgccgccggcgggtacggcgagtccgccgagtacacggaggccacggtgacggaggtggtgtccacgggcgagaacgagtacgacgagtacaagaaggaggagaaggagcacaagcacaagcagcacctcggcgaggccggcgccatcgccgccggcgccttcgcactctacgagaagcacgaggcgaagaaggacccggagcacgcgcaccgccacaagatcgangaggaggtcgcggcggcggcggccgtcggctccggggcttcgccttcacgag

SEQ ID NO: 13924 - DNA, 320 bp, Zea mays
  unsure (1)..(320): unsure at all n locations; Clone ID: LIB3159-008-Q1-K1-H11
ttggcttctcctccccctccggttcgggttcgggttcgtgaggttctccggggttcggggtcgtgggtgagcggatcgagatggcggcgtcngatgttgagtaccgctgcttcgtcggcggcctcgcctgggccacggacgaccactccctccacaacgccttcagcacctacggcgaggtcctcgagtccaagatcattcttgatcgggagacgcaaaggtcccgcggcttcggctttgtcaccttcttcaccgaggaagcgatgccgaacgccatcgagggcatgaaccgcaaggagctggacggccgcaacatcacc

SEQ ID NO: 13925 - DNA, 488 bp, Zea mays
  Clone ID: LIB3159-008-Q1-K1-H2
cggccggattcccggtcgaccacgcctccgcggccccgtggccccgaggcccgttcgcaggtcacttctcaattctcaaccttttcttcgggcggcgtgcgctctctctctcctcctcgtgcggcagctgggtgaggtttccaggtcttggtcttgtcattcgccagcgacgagactcaccaggtttgcattgatcagtatggtgactgaaaatgcagatgaagaacgtgacactggtccagaaaataagttaagacacaattttcgattgggagatataacatgggttaagtacaatggctcttcatggtggccatcccaggtcattgatgaatcatggtgtgggagccagcccttaaaggaaggacaggttgaatggctaattcggctttattgaacatgtcaatatttatatgtagacccttggaagtctaactcagaatttgaaatgatgctgaagcaagaaaacaagagccaatggaagcatt

SEQ ID NO: 13926 - DNA, 295 bp, Zea mays
  Clone ID: LIB3159-008-Q1-K1-H3
caaccgtaaaggtgaagtcaagattaccgacttcggagtgagtgctgtgctagcaagctgaataggtcagcgagatacatttgttggaacctacaactatatggcgcctgagcggattagtggtagcacttatgactacaaaagtgacatatggagtttgggcttagttatacttgagtgtgccattggccggttcccttatataccttcggaaggtgaaggttggttaagcttttatgaacttctggaggccattgtcgatcagccaccaccttctgcacctgcagatcagttc

SEQ ID NO: 13927 - DNA, 377 bp, Zea mays
  Clone ID: LIB3159-008-Q1-K1-H4
cgtccgggacaagagttcaaaggagggaaaagaaacattagaagcacttgatgggtcagaggagacgggggtgcaggacctgatgaagatacttctgctgtggatgtgaaggagcgcttgaagaagatggcatcaatgaagaagaagaaatcgagcagagagacggacacagctgccaaaattgccgctgccgaggctgcagcaaggagtgcaaggcttgcggcggccaagaagaaagaaaagagtcattacaaccagcagcccgtgcggtaaatgggcataaagttttgagtttgggtgctgtgagtttgatatccccttgtttcgtttggactcgcaataaaacttttttgagttatcgtatttatgactgggaa

SEQ ID NO: 13928 - DNA, 378 bp, Zea mays
  Clone ID: LIB3159-008-Q1-K1-H5
tccgcggacccttggccccccactcctcgccgcgcttcacatctgaaacctccagcccgacgcgcgcgccggcgccgctgctcgcctgctcgtcacatttcctggtgcccgccaagccccgcgacctgggctccccagctccatccatcaaccgcctgcagccgcggaaatggcagcgccgacgacgctgcgctcggcggcggcgcgggcgcgcgcgcgcgcagcggagctcgtgagagggcggtggccgcagcggcgtctggggacgacgtccgcggcggagacggagagcaaaaagaataaggaggaggaggaggagggggccgggtgggagctctcggcggcgcgggagtactacgactaccgcaagtctatcta

SEQ ID NO: 13929 - DNA, 247 bp, Zea mays
  Clone ID: LIB3159-008-Q1-K1-H9
acgcctacattctccttactgccacatactacagttgtatctctcccgattattctactaacacccgcccgctttaaaaaggggaggctgctataactaaaaaacttctataagatttaccccatcaattttgctcccatgataattatccctctattctacaaaacaggggatgattcttacaccctgtgcctaaccccccatcatctctacaccttccaccttccaaccaatgttagtgatatca

SEQ ID NO: 13930 - DNA, 314 bp, Zea mays
  Clone ID: LIB3159-009-Q1-K1-A2
cgattacctgatcgaacagggcttctaagtttgtcataatgctattttggtcattgggcagtgaagtttgcacctcatttggttctgtaatatgtgggcttgtgcatgtgcttggcgtattgcatgcagagaataatttatcttcgcgttgggttggtgacaatgttgggaacggatttgaattggggtttatgcttgccatctcctcatatctcgaactcagctgctgtttcactgagtaatgtacatttccctggtaatggtacttgtgcactctgctgctttatggattataaatttaaattaattataat

SEQ ID NO: 13931 - DNA, 181 bp, Zea mays
  Clone ID: LIB3159-009-Q1-K1-A5
cggcgagcactctggtggcctaagtgatatcctctgatggcttggtctttagcacctatgagcttgttctagatatgaatttatgtaattcttgttatgtctggagctggttagatggacaaggaacctcaactttttctatgtttacttggagaatcccataaaccatttttggtttcgc

SEQ ID NO: 13932 - DNA, 268 bp, Zea mays
  Clone ID: LIB3159-009-Q1-K1-A6
aggaaatgaaccgaaagttagaggtgtatgataagcagatgaaggcagccaggatgtctgggagcaagggcgcacatgataaggttaatggtcaggctctgtcaaaggctgctaaagaggccgccaagaacaaggggaaggggaagagtgctgcatatgatgacgattaccagaaacatgtggctgttccacagaactggcgagactacatcggtttagttctcattttccatatccgatcaatctcacatccacctcttcttcatct

SEQ ID NO: 13933 - DNA, 387 bp, Zea mays
  Clone ID: LIB3159-009-Q1-K1-A7
cgagttacatgttcggtggaacaattattggcaccgggagtttgccgggcatgtcaaaatggctatgggcagattctgacaggaagttgactttgtgctgttatttttgcaggaagttgactttcctctgttgctgctatgctcagtgtggatgacattgtgctgcctcagatcaacgtccgctggtccgccctcagtacgcacctgccgttcgttgctgctagaagcatcgcgttgcagatcgactttcttcgtgctccacaccttcgcctcgcccgttctcatgccccgcagctaatactttccatccggcttctacaccttacgggtcgaatgggccatccttaccgtccaactcggggacatttttgaccatgggaaacgagc

SEQ ID NO: 13934 - DNA, 161 bp, Zea mays
  Clone ID: LIB3159-009-Q1-K1-A8
atctaactcccacttgtaccaactctgcaggtcactagccaacatcggcctgaatataaaagccattgacgactctcgcccggacataagagactgcaccaacaaaataatcccgtacacactgcccgaccaagtgaaaaccatgctcaatgccatgttct

SEQ ID NO: 13935 - DNA, 364 bp, Zea mays
  Clone ID: LIB3159-009-Q1-K1-B11
ggggggggggagaagggaaaaaaaaaaagggggggggggagggggggggaaaaaaaaaggggagggggaaaagggggggggacgaaaggaaggaaaaaggggggggaaggggggggaaggagggggggggggggggggagggagggagggggagggggggagggggggagggaggaaggggggggagggggggggagggggggggggggggggggggggggggggaggggggggagggggggggggaggggggggggggggagggggagggggggggagggggaggggggggggggaggggaggaagaggggggggagggggggggggggggggagggagggagggaaaggagggagggggggg

SEQ ID NO: 13936 - DNA, 321 bp, Zea mays
  Clone ID: LIB3159-009-Q1-K1-B3
cgaccgcacgcgtccgcttcgagctttgtggtacccctgacgacactatctggcctggtgtcacaaaaatgccatgggacaacttcttcaagcctcaccggccattaaagagacgagttaaagacttctttaaacattttgatcggcatgcactggatctgttagagaagatgttgactttagatccatcacagaggatatcagcaaaagatgcacttgatgcggaatatttctggactgatcctttaccttgcgatccaaaaagcttgcccaagtatgaagcatcacatgaattccagactaagaaaaagcgtcagcaac

SEQ ID NO: 13937 - DNA, 353 bp, Zea mays
  Clone ID: LIB3159-009-Q1-K1-B5
agttgattcaccagagggacggaacttgtctgtttcgtccgtattccacaagtcatttggcgaagtgtacgatgaaggaacggaggccgctgccacatctgctgcaacagttgtgctccggtcgttcacgatgcctcatgatttcgtcgcagatcaccctttcatgttcctgatccgcgaagacttgactggtgtggtgctgtttgtcggccacgttgtgaatcccctccttgctccatagtgtgttgttcagaagtgtggccttggtgcaggtccatcccctcacaaatgtgtggctttgacagctgatcaagctttatttgttattctgccatgttttggtttttgaataa

SEQ ID NO: 13938 - DNA, 368 bp, Zea mays
  Clone ID: LIB3159-009-Q1-K1-B6
gtccggcactagcactagctatccagtggagacgaagatggcgacggcgcggtggctgcagggtgccggcatggcggtggcgctgctggcggagtgggcgacggcggcggcgcctcggaagcccgtggacgtgccgttccagaagaactacgtgccgacgtgggcgcaggaccacatccactacatcgacggcgggcgggaggtgcagctgtacctggacaagtccaccggcacgggcttccagacgcggggctcctacctcttcggccacttcagcatgcacatgaagctcgtcggcggcgactccgcgggcaccgtcacggccttctacctgtcgtcgcagaactcggagcacgacgagatcgact

SEQ ID NO: 13939 - DNA, 292 bp, Zea mays
  Clone ID: LIB3159-009-Q1-K1-B8
gcgaaccacgcggccgcccacgcgtccgtgcatacttcctccgggacctgccccctgttcccaccgccggattcgagaatcatccagtgcttgctaaagaatatgaacgtgttcaggctggcaaacctccttttatgctagatatgtctcgctatggtttggagccacctccaatgaacaagaggaatgatgttggcgcttggaagcaggctctacagaatgctcatagccagttgcagcatcaaattttaaggatagagaatctcgagcttattctgaaatatggcgtata

SEQ ID NO: 13940 - DNA, 347 bp, Zea mays
  Clone ID: LIB3159-009-Q1-K1-C1
cgacaccacgcgtgcgtgaacaagcagaagactgatggcaaagatgtggattccatatctgtcggcgaaaacaacagagggaaaatgtctgcttccagaagtttggatgtcaacaattcaacaaagaaagctaacttgggtacttcatctggatcatcatcctatgaagaaatttctggctttcacaacacacactgcagtcatttacagtggagagattgcgtgcacttctaacgacaaagtggtcgatcgaccaaaggcaaaaaggatgaactgattgctcgcttacgggagtcgcaaggttgacatgaatctggtacttggttaatcaatcaaaccccttcatg

SEQ ID NO: 13941 - DNA, 323 bp, Zea mays
  Clone ID: LIB3159-009-Q1-K1-C3
ttccgaccacgcgtccgctggtggcggagctgctccagttgctgctgtcgcacctgctggtggtgctgctgctgctgaggcccctactgtcgttgagaagaaggaagaggccaatgaagagtctgatgacgacatgggcttcatcctgttcgactgaagagaccccctcacccagccattagcaaatttcacttgtgctgtcaaagactatcttgtcttatgttatgtctctaagcttttgttacaactacccaagttttgagtttttgagatgtggctatggcatgaactcaaaccatcttatgaaggggaaacctgtttct

SEQ ID NO: 13942 - DNA, 334 bp, Zea mays
  Clone ID: LIB3159-009-Q1-K1-C4
cgaccgacgcgtccgcggacgcgtggtctccgcctcgggccaaaccctacgcaaggagttgattgatcgattgcaagcatgagttagttgcattccgagcttctcaaggattgcatctcccagatagttcaagatgccaagaagaataggaagttcactgagactgttgagcttcagattagtctgaagaattatgatccacaaaaggacaagcgtttcagtggctctgttaagttgcctcacatccctcgtccaaagatgaaagtgtgcatgcttggtgatgcccagcacgttgaggaggctgagaagatgggacttgactacatggatgttg

SEQ ID NO: 13943 - DNA, 309 bp, Zea mays
  Clone ID: LIB3159-009-Q1-K1-D11
tccagtcctccgtcatccgtttcgctctctgccgccgccaccgcacaagaagctagctggtgcctgtaccgccccgtcatggcgatgctatcccgcgcagcctcctccgcggcccggcgcccgctgctgccgccgcctatgcttttggcggtgagggcgatggcttcttctctcttctgccacgtcgagccggcgcccaaagaccccatcctcggcgtcaccgaggcttttctcgccgacccctcgtccgacaaagtgaacgtcggcgtctgcgcctaccgggacgacaacggccagcccgtcgtgctc

SEQ ID NO: 13944 - DNA, 282 bp, Zea mays
  Clone ID: LIB3159-009-Q1-K1-D12
gcaaccgcgccttctccctttccctccgctccttcttcatcttcatccccgcgcgcccgatgcgccatactccgatttcccaggccaagaaaagggaggcagattggggtgcggaggatggcgtccggatttgatgcctttgcgtctttcgccggcaaggtcttcgtggatgatgcgattggagcggaatatggggagggctttgaaacatttcgaatggatggaccactcaaggttgatgtgtattatctgaatgaaaaattgcaagagtgcttttttcaa

SEQ ID NO: 13945 - DNA, 308 bp, Zea mays
  Clone ID: LIB3159-009-Q1-K1-D2
gaccgacgcgtccgggagaactcaatgaggcataattgcccaatctgttatgagtatctatttgactcattacaaggaacaagagttcttaactgtggacacacaatgcacttgacatgttttgaagaaatggtggcgcataacaaatacacttgtccaatatgctctaaaacagctcttgatttgacacatcattgggaaatgttggatcaagagatcgaatccacgatcatgcctcttgtgtatcgctacaagatttgggtgctttgcaacgattgcaacaaggtcttagaggtgaactttcacgt

SEQ ID NO: 13946 - DNA, 395 bp, Zea mays
  Clone ID: LIB3159-009-Q1-K1-D3
gaaaaggggcaggaagaaatcgagcctcactcgatccatcgcctcgccgcagcacacacgaggccggcggcgccatggccatgaagctggacatgtccgcgctcgagaccaacttcgccaacctgaccgcctccgccggcgacgacacgtacttctccgccgaggcccccgacgtgccgtccatggtgctccccatctgcgacgacttcgacggcttccaggcggccaccaaggatatggtgaagaataagaaggggacgaccacgcttgccttcatcttcgacaagggcgtcatcgtcgccgctgattccaaggccagcatgggcggttatatatcctcacaaaccgtgaggaaaattattgaaataaatccttacatgctggggacaatggct

SEQ ID NO: 13947 - DNA, 326 bp, Zea mays
  Clone ID: LIB3159-009-Q1-K1-D7
cccgggccgacccactcgtccgaagaaatgcacgccaaccctgttcctatcattggcaactacagcgatagcgagctactttgcgctctgctcgcgcgacatgttgggagtcactcattgtaccatccctcatgcctgcggagaaaaccaaataccccaactcggacatatactgggacaaattctacagccagaaccacttttcttgccagtgcacagctgaccttattgccatgaaccacaccgatttcatcatcagctgcacattccaagaaatcgcggaaagcatagacaccgcgaggcagtacgatgcccacatctaatac

SEQ ID NO: 13948 - DNA, 371 bp, Zea mays
  Clone ID: LIB3159-009-Q1-K1-E1
acctactcgccgtcgcggtgccgtgcgcctgtgctgttcagtctaaggtttcggccctcgcgggccgatgcgtccccccgccggccatgtctaatcaaggagggaaggccaagccgctgaaggcgcccaaggtcgacaagaaggagtacgacgagagtgatcttgcttatttgcagaagaaaaaagatgaggaaaaggcgctgaaagagctgaaggccaaggcacagaagggcgcaattggaggctcgggtctcaagaaaagtggaaagaaatgagcattgcccacccacccatctccaaaacacctaagagaacgataagacagctgcttatctgtgttgcgcttcactatatgatatatgtggctgtga

SEQ ID NO: 13949 - DNA, 253 bp, Zea mays
  unsure (1)..(253): unsure at all n locations; Clone ID: LIB3159-009-Q1-K1-E10
cgggggacggcacgcgtccgatttccttctttagccgcctcctccgatccccttccgaggctacagaaccagttcatccgancgctaatggcggcggcgaggagcctgcttctgaggcacctccgcttgtcggcggccccttcagcggcgtccgtgaggccgtcggcgtctatgcatgaggccctgtgtgggcagcggtggatgtcttctgaggattccaatggctctttcctgtacaagagcgatgtcactg

SEQ ID NO: 13950 - DNA, 316 bp, Zea mays
  Clone ID: LIB3159-009-Q1-K1-E12
gccacatggcatcgcattatacgtgtagatgctattcgagcaaatacagaatgggttctgtgggcccgtaaccaggctgaagtctctaaagagaaagcgctgcagtctgcaatatctgtcgggttgaaagattttgaccatttagagccttacatgatctatcatgctgcacgattagttgcactgcttgaggcatatgcactttatgatccagagatcgggtactgtcaaggaatgagtgatctcttgtcaccaaaaattgcagtcatggaggaagatcatgaagcgttctggtgctttgtgggttttatgagga

SEQ ID NO: 13951 - DNA, 379 bp, Zea mays
  Clone ID: LIB3159-009-Q1-K1-E2
cgaccgacgcgtccgcgccacccccttcaagtaaggaagaggaggttggcaggatgtcgcaccgtaagttcaagcagccgatgtctacggctccctcagcttccttcccaagaagcgctcctcccgccaccgcggcaaggtgaagtcattccccagggatgaccccaagaagccttgccatctcactgccttccttggctacaaggctggcatgactcacattgtccgtgaggttgagaagccaggatccaaactccataagaaggaaacttgtgaggctgttaccatcattgaaacccctcctcttgtcattgtagggctcgagccatatgtgaagactcctcgttgcctccgcacactcaactttgtttgggcccaa

SEQ ID NO: 13952 - DNA, 358 bp, Zea mays
  Clone ID: LIB3159-009-Q1-K1-E3
tgcgactccacaaccacacgttcacggtagctagagcttatcgtcgtcggcggtgaaaaaagagtctctgaagctgcagaagcggctcgccgctagcgtcctcaagtgtgggaaaggcaaagtctggcttgaccccaatgaagtcagcgagatctccatggctaactcccgccagaacatccggaagttggttaaggatgggtttatcatcaggaagcctcagaaggttcactctatgtcccgtgcaagaagggcacatgaggccaagcagaaaggaaggcactctggatacagcaagcgcaggggtaccagggaggctaggctccccaccaagattctgtggatgaggaggatgcgt

SEQ ID NO: 13953 - DNA, 397 bp, Zea mays
  Clone ID: LIB3159-009-Q1-K1-E4
aggcgaatgagtatcagcagcaagcggcgcctagtagctgctccccatctcgagcttgccagcatggcgagaggattgaagaagcatttgaagaggctcaatgcccccaagcattggatgctggacaagcttggcggagcttttgctcccaagccatcttctggacctcacaagtctagggagtgcctgccactgatcctcatcatcaggaacaggctcaagtatgctcttacataccgtgaggtcatttccatcctgatgcaacgccatgtacttgttgatggcaaggtcaggacagacaagacctaccctgctgggttcatggatgtcatttccatccccaaaaccaatgagaactacaggctgctgtacgataccaagggcccgttccgccttc

SEQ ID NO: 13954 - DNA, 342 bp, Zea mays
  Clone ID: LIB3159-009-Q1-K1-E6
ctgacgcgtgggcgaagctcatccacggcatcatggaagccatgccacatctagcgccatcgacggctcggtccgcgtcccccacagacactttcctgaggtcctcggtatcgtccacaccgcatccgctggcgaagctgaaggacatctgcctcgacgacgagatctccatggtgacaccgcccgccggcatgctgtaggatagtgacgacgccatggaggacccctcgtgctccaacaactcgtccatggacgacggctgttgcgccaggacggcagagagcgcggcccggaagcacgggtgcggcaacaggaagctcatcaacatctgctttggcgcgc

SEQ ID NO: 13955 - DNA, 230 bp, Zea mays
  Clone ID: LIB3159-009-Q1-K1-E7
tccttcccctcagctatcatcctaccttaaacccactaaataccgctacaaacccaagcgcttttgcatattatattgtcgatcaccacattccaaccttcctccccttttctctctctttcactctttttctctctccaacaaacaattgactccaaaaccaaccgccacaagcacaaccccttgcttgctagatatcactctttctctctctgctagctctaacgcca

SEQ ID NO: 13956 - DNA, 273 bp, Zea mays
  Clone ID: LIB3159-009-Q1-K1-E8
catccctcctccctcaatgcccccaagcattggatgctggacaagctcggcggagcttttgctcccaagccatcttctggaccgcacaagtctagggagtgcctgccactgatcctcatcatcaggaacaggctcaaggatgctcttacataccgtgaggacagtgtcactctgatgcaacgccgatttctagatcttggcgatgcaggacagacatgacctaccctgctgggttcatggaagtcatttccatccccaagaccaatgataact

SEQ ID NO: 13957 - DNA, 289 bp, Zea mays
  Clone ID: LIB3159-009-Q1-K1-F1
atcttctccttcccccggcaatcgtcctagctgcaacgcactagatctgtcgacaaacccagccagaactgcataaaatagtgtcgatcaccacaagcaaacctccctccccgtttctctctctttcactctttttctctctccaagaaataattgactccaacgccaagcgccacaagcacaagcccttgcttgcttgatgtcactctttcgctctcgctagctctaacgccaccgctgacggcgctgccgatccctcagtccaccgcccaacgtcatacaccaagtc

SEQ ID NO: 13958 - DNA, 238 bp, Zea mays
  Clone ID: LIB3159-009-Q1-K1-F12
gaacgacccacgcgtttcagtcttcttgatacatttttggactattacaataaaggtgatagatgtcataatgggtgttgcgctcatttttacacatgtgcgtttaataatgttaataagaattgttttgtcaccattactaatgaaaatattatcttcttgcaacaagaccttttattagcactacaatatcattaatgagtttgtattcactaatttatttttgaatagttttgtt

SEQ ID NO: 13959 - DNA, 436 bp, Zea mays
  Clone ID: LIB3159-009-Q1-K1-F2
cgaccgacgcgtccgcgcctctctgctcagatctgcggcggagcctctccggcggcctgcgccccgcggcgccgcagatccatgatgccttcgtgcgtgcagggcccctgctgctgctcgtccctgcgccttctcccccgcgacgacgcgctctcgtccccctccgcctgcgcgcaccgcctgaagccttggtcttggcgtgcccaatcccccacctcgtcctcctaacgcttgtccccgcccgctccccaccctgatctacctgtctctacccttccctcctccatttctacatctccccgttgctgctctgctcctgctgccacaagagtattcgccttcaatcgttgctcgcgcctgtcatttcgtgccgcacgccgacttgtttgccgttttcgctgccgtcttctggtggatcggatttgtctggatcgat

SEQ ID NO: 13960 - DNA, 448 bp, Zea mays
  Clone ID: LIB3159-009-Q1-K1-F4
ctgttcatggctggcgccgcgctgctcgccggggctgccggcgccggcgcgcagcaaggcgggtggaacgtcatcacccggcccatgttccagagcatgctgagccaccgcggcgacagcgggtgccagggcgccttctacacctacgacgccttcatcgaggccgccagcaagttccccggcttcggcaccaccggcgacgagcagacgcgcaggcgggagctcgccgccttcttcggccagacgtcccacgaaaccaccggtggatgggcgactgctccggatggaccgtttgcctggggatactgccgggtgaaggaacagaaacagacggacccaccctactatggacgaggacccatacagctaactcataaatacaactacaggctcgccgggcaagcgctgaacctgaacctggtgggcgacccggacctgggggcgagag

SEQ ID NO: 13961 - DNA, 338 bp, Zea mays
  Clone ID: LIB3159-009-Q1-K1-F5
cgcgtccgatcttctccttcccccggcaatcgtcctatttgcaacgcactagatctgtcgacaaacccagacagatctccataaaatagtggcgatcaccacaggcatacctccctccccgtttctctctctttcactctttttctctctccaagaaataattgactccatcgcctatcgccactagcacagtcccttgcttgcttgatgtcactctctcactgtagctacctctaacgccaccgctgacagcgctgccgagccttcagtccaccgtccaacgtcattacaccatattcatgtcatcaaccccacaataaacactttcttatgtcaac

SEQ ID NO: 13962 - DNA, 385 bp, Zea mays
  Clone ID: LIB3159-009-Q1-K1-F6
acgcgtcctgaataaagcactacatcaagagatggatagtttgctggctgaagctgaaagccagagtgatgatggcctaacacataaactccgatatgcacatctacacaaactaaaatcccttgaagcccagattctatacctaaataaaaagcactaaaaccaaactcaaattttgaaggaaaagcagaagagtgatgaaactgctaagaaactgcacgaagaaattcattttataaaagcgcataatgttcaactacaacacataatttaacaggaagcacatcagttcacgcaatggaaagctacccgcgagaaggaacttcttcagctacgcaaggagggacagtataatcaatatcaactccacattcttcatgcactt

SEQ ID NO: 13963 - DNA, 201 bp, Zea mays
  Clone ID: LIB3159-009-Q1-K1-F7
cgtctccagttcttccaacttgtttgaatttacacatattgaatgaagacacagaatgttcaagaggccaccctcttcagctctgactttatcaatgagccaaaagccttcaacaagcccctgcgttcccccttcaagatggtcaagattgaaggattggaactgtcctgtggacggttagactgggtcattaacctgtta

SEQ ID NO: 13964 - DNA, 202 bp, Zea mays
  Clone ID: LIB3159-009-Q1-K1-F8
cgcgtccgctggtcatggctggcgccgcgctgctcgccttggctgccggcgccggcgcgcatcatggcgtgtggtgcatcatcacccggcccatgttccaaagcatgctgagccaccgcggcgacagcgggtgccaaggcgccttctacacctaccacgccttcattgaggccggcaacaaattccccgggtttcgcaccac

SEQ ID NO: 13965 - DNA, 327 bp, Zea mays
  unsure (1)..(327): unsure at all n locations; Clone ID: LIB3159-009-Q1-K1-F9
agagtttcctgcatccgcctccgccccccaccttctccaccttctccccccacctcccggcggcacattattaaggattgaagcccctttctccctctactccttctcgccgtaatccgcccccaagcttgccccacgctcccctttgtagcagcatcagtctcccttctatgaaggatattacatggataaaccaacacattttagatttctagtgtctaatactgcagcacgtttcatcattcgcaatggttgatcaaccannnangatttttaatcctagtctttgtcctttattcanttatcacctaccaatgatttttttcc

SEQ ID NO: 13966 - DNA, 345 bp, Zea mays
  Clone ID: LIB3159-009-Q1-K1-G1
tgaatggacgggagggagtccacagtggcactcggagttccaacactctcatcgttctacacgcagcacgagggcatctgggcgccgggtgtccccgcccactcgtgtgtgctccatgacccgccgcccgccgggtaccggcagcatcttgatgctgtctctgctgggtacgcattccagaccccgcaagttgggggttcccacattggacaggggtaccaccatgtcgaggcctcaccccatgtggcgcaatacagctccggtggcggcaccagctccggcggtgatatggacattggcatgggttcggctgtgtgcaccaatgttaaggtggagctgtggagc

SEQ ID NO: 13967 - DNA, 324 bp, Zea mays
  Clone ID: LIB3159-009-Q1-K1-G3
cgaccgacgcgtccagggagattcaaccactctcaggatggttatttgatcaatgtacactgctgtgaggcttgtagaaatcttctatagttcaactgggcatccaattgtttcaattgagaggacggtcttctacagagagagggctgctgggatgtactctgcaatgccatatgccattgctcatgtaaagaaatatcatagtatacagaatacagtggtgactaaagtgctatcttctctccgcagtctctcagtttttatgctttgcaggttgtcatagagataccatatgtgtttgtccatacaacttattacaccctt

SEQ ID NO: 13968 - DNA, 414 bp, Zea mays
  Clone ID: LIB3159-009-Q1-K1-G5
ggagcacaaactgccccccctccacagcatctggaagcaatggctcgagtggagtgacagaagaccatgctaatctgaaagcttccatctggcttaagagtgccgtgagggtgaggaggacagaactgacctacatagggtctgtaaatgacgacagctgatacgtgtatgattatcttggtgaattggaggcaaagaatttggtctcacttgttggcatttgtgtcgtgtgcaagttaaaagcaccaactgcatcgaattctttgagagctctgtaccacaaggtggaatggaaaccatatggcttttaggtaggttgtgtaatgttagaatacatcactgcccccaatttgttttagttaaggcctgtggaggcggctgaatataagtggaatccatttctggattcaatgg

SEQ ID NO: 13969 - DNA, 186 bp, Zea mays
  Clone ID: LIB3159-009-Q1-K1-G7
gcaggacctattcgccaccagtccttcatcatgtccgacggctaccgcattcttgacgacatagatgctttctaatacaccgtcggcagccgcatctacagccgcgccaaggcccttgatgtcaccgcgcccggcagcggcccgcttgccggcggggaacgtcccaacggcggcaacagcggttgt

SEQ ID NO: 13970 - DNA, 434 bp, Zea mays
  unsure (1)..(434): unsure at all n locations; Clone ID: LIB3159-009-Q1-K1-G8
gacttgcagtacgttgttttccacgcgaacatcgatgccaaggacaatcaggcttaccaggaattctatgtaaggcatgtgaatggatcgccaatgaacactgaaaccgagaggttgcgagtcatccaatgcctggaagcagccatcgaacggagggtatctgagggtgtgaagcttgagctgtgcaccaacgacaaggtcgggctgctatccgaggtcacccgcatcttccgcgagaacagcctgacggttacgagggcggaggtgaccacgcggggcaggatggccgtgaacacgttctacgtgcgcggctccgcgggagaggccgtcgaccagaaggcgatcgactccatcagggaggccataggccacagcctccaggtgaaaggccaggccgagccaccggagccgcagaagtaagagtcccncacgtg

SEQ ID NO: 13971 - DNA, 279 bp, Zea mays
  unsure (1)..(279): unsure at all n locations; Clone ID: LIB3159-009-Q1-K1-H1
gcgtccgntgatccactactntactcaatgtctagatttagcattntgctttgctcacggcgcaaaaagaagtttttggaggggaccacgcatctcccccacctcctgcatcgactatgccaagacgccgcttcataggccaaggtcgcgcctccgacaccatgcaacaatgccaacccatttcagaacagatccgccgccactaattgcggccgtatcaccataagcaactacctgtgatacagaccggaccattataaataccttagcctctatatt

SEQ ID NO: 13972 - DNA, 303 bp, Zea mays
  Clone ID: LIB3159-009-Q1-K1-H11
cgcgtccggaccagatgtactgcgaggaggtcgcgtacaactagtactacgaggcccagctccacgagcggcttaccgggtacgggagcgtgtctgagatttggttcgacggcgccaagggcaataacgcgaccaatatgacgtaccacttccaggagtggttccagacggtgaagcagctgcagcgctccatcaacatcttcttcgacaacaggcccgacgtccgctgggtcggcgacgagaagggctacgccggaaccacctgctggtccaccgtcaaccgatccatgatcaccattttga

SEQ ID NO: 13973 - DNA, 234 bp, Zea mays
  Clone ID: LIB3159-009-Q1-K1-H2
ccgtccgggtgtgctctccttactttacacgcaaacatctacttttaggacattcaggcacaccagagattctgtgtaattcatgtgaatgaaccgccaatgtacactgaaaccgatatattgcgagtcatccaatgcctggaagcagccatcgaacgaaaggtatctgagggtgtgaagcttgagctgcgcaccaacgacaaggtcgggctgctatccgaggtcacccgcatc

SEQ ID NO: 13974 - DNA, 394 bp, Zea mays
  Clone ID: LIB3159-009-Q1-K1-H5
aagaagccggacaaagctacgcaaggagggagaaagcgtgtaaaccatggcgtcctccgagggcctcatcgctctcgtgctacgatcgccatcaccgtcgctctcgtcctcgtcgtaaccggcgcagcaccggcgccttcgcgttcccgaacccaccgcgcttcccatgcctgcgttctgcgcgtcgactcgtccttgcgagggcggcggctgcgccggcgccgggcgatggccccgaagacgagtggcggccacaacccgagggcggttccgctgtcacaggagccgcggtggcacaagctccggacgcgagagaggtcgcgaagctcaaggcgcaactaaaggacgcgctgtacggcacggagcggggcctgcgggcgttcagcaagtcacg

SEQ ID NO: 13975 - DNA, 430 bp, Zea mays
  Clone ID: LIB3159-009-Q1-K1-H7
cttgcatctccccgccgccgccacgcgcccacgcttccttccgaacaaagctgtcgtgctggctttcttgccgtccaactcaagcagccgtcctagtcctcgttggtcctcatctgctgcccttctacggtggaggagagaagaggagaggagcggagcggagatccagccgctttccggctgctttcttcttctaattgcggagcaagttccgtcaatactgcttgtggtgttgcgccaatttaagttcctgctgtccgcaaaaggagagcttccgcagctcctatggcaaagcctcccaatagcattggccgtatcagcatgccaagatcgaatgaagtgttgaggctcatattttccggcagtataggtatcattgctgggttaccctgtttgggattctccttccctacagtcaacataaccaagc

SEQ ID NO: 13976 - DNA, 400 bp, Zea mays
  Clone ID: LIB3159-009-Q1-K1-H9
ctcccctgggacagacaaggtgaattgggcattatccaaaggcaaattcgtagtgcatggaggatgggtagaagcttcagctctgttgtaccggcgcgccaacgaacatgactttgcagtcaaataacaccctccctgagcccgaattcatcatataggcttcggggaagaattcttctcagggatggaatgtgttcatggtaacctaacatgattaaaaaaaaaccataacaacatatctaaaatgggaccatggtaagaaggaaaaccaccacccaaagaatttcaggccttaaaatgaatggtaacgaagaaaacgctttatgatagcctggaagaggagactgggtctgttgtggatgtcattacctaagtggtgggtggtcaagatttcttttta

SEQ ID NO: 13977 - DNA, 365 bp, Zea mays
  Clone ID: LIB3159-010-Q1-K1-A1
atatacccagattgcaatacggtttgctgaattgcatgatacttccctaagaatggcagctaaaggtgtgattaagaaagttgtagattgggaagaatcacgctcgttcttctataaaaggctacggaggaggatcgcagaagatgttcttgcaaaagaaataaggcagatagtcggtgataaatttacgcaccaattagcaatggagctcatcaaggaatggtaccttgcttctcaagccacaacaggaagcactggatgggatgacgatgatgcttttgttgcctggaaggacagtcctgaaaactacaaggggcatatccaaaagcttatggctcaaaaagtgtctcattcgctctctgatc

SEQ ID NO: 13978 - DNA, 417 bp, Zea mays
  Clone ID: LIB3159-010-Q1-K1-A2
cggacgcgtgggtgcggaaaaggaagataaggatgactataagaagttttgggagagcgtgggcgagtttatcaagcttggttgcatcgaggacacagggaatcacaagcgccttgctccattgttgcgcttgcactcttctaaaaacgagggagatttgataagtcttgatcaatatgtagagagcatgcctgaaagtcaaaaggcaatctactacatcgctacagatagtctccagagtgcaaaaactgctcctttcctggaaaagctggtccagaaagatattgaagttctctaccttattgagccgatagatgaggttgccattcagaacttgcagacctacaaagaaaaaaaatttggggatatcaacaaaaaagatctggaattgggtgagaaaatgcctatgccttttca

SEQ ID NO: 13979 - DNA, 96 bp, Zea mays
  unsure (1)..(96): unsure at all n locations; Clone ID: LIB3159-010-Q1-K1-A3
atgctgagaacctcggtagctgagttataagagaacgcagtccttcactttatttttagttcttacnaagttttgggagtaggagactttggacac

SEQ ID NO: 13980 - DNA, 340 bp, Zea mays
  Clone ID: LIB3159-010-Q1-K1-A4
gccaaagctgatatctcacgtgtcatgaaccatatgaaagatatgggagtgttggttggtgagggtggtttctacgggaacgtttttaggataacaccaccgttgtgcttcaccaaagaggattccgacttcttcattgaagtgatggacattgcgctctcgaagctgtgaggcaggcacggcgaagatgatgtgcaaaccctggtccgtggccatgggttttttgcccatgaataatattaagattagcgagacagcaccttgttgtctcttaatctaaaacgatgccatgtcatccggtggcatggtattcctgcttgcccataaataatggacgagt

SEQ ID NO: 13981 - DNA, 365 bp, Zea mays
  Clone ID: LIB3159-010-Q1-K1-A6
gtactacttcctggtggcaaacgccaagttcatgctggacgaggaggagcatttgcaggagcaactcgccgagaagctgcgcaactacgccgagcgcgacaaggagcaggacttctggctcgtcgtggagcccaagttcctcgacaggttccccaacatcaccaagcgcctcaagcgccccgccgtcgcgcttgtctccaccgacggcaactggatcacattcatgaagttaaggctagacagggtcttacaagaccagttcgacgcagaatcaattgaaaaggcattggcttctaaccctgttgagttgaaatttgagaagcctgagaaatggacagctccgtaccctaaatatgggtttggat

SEQ ID NO: 13982 - DNA, 336 bp, Zea mays
  Clone ID: LIB3159-010-Q1-K1-A7
gctgagcaaccactcccatgctacctgcacagggttaccctgcaatgtggaacgcggcaatgaggagcgacttggagcctccaccatatgccgcgacgcatggagtccatcatggttaccaccaccctgtccagccaggctggcctggggttcattgcgcatcgccgttcataggaccctctacacccgggtaccctcctcctcagttttatcccaggtagcagtacctgctgtgttgaggggtgttgctccatcgcccagtataacatggattacgcgcaagaattcagttaggactttggagaaataaaatggtatgttttcttcagtgatctg

SEQ ID NO: 13983 - DNA, 224 bp, Zea mays
  Clone ID: LIB3159-010-Q1-K1-A9
caggtttacagaatgggctctaaagtgtatcgggctgcattcacgtgttcgagagaacgggggcaaaggaaaccacgacactgtaattgaggttcagcttcagttgattggtttcaaaaaaattccttgaacttgctgataatgagcttaccgggaaggattttaccgagggttttgatgctgcatgctttcctcttacactcttttcaaccacctttgaccta

SEQ ID NO: 13984 - DNA, 358 bp, Zea mays
  Clone ID: LIB3159-010-Q1-K1-B1
cgatcccttcacaaagcgccgccgtcgccccatcgaacatggctccgaagaaagataaggggccgcccccgtcgtcgaagcccgccaagtccggcggtggcaagcagaagaagaagaagtggagcaagggaaagctaaaggagaaggtgaacaacgcggtgctgttcgaccaggctacctacgacaagctgctctctgaggtgcccaagtacaagcagatcaccccctccatcctatccgagcgcctcaagatcaatggctccctggctcggagggctatcaaggacctgatggcgcgtggcctcatccggttggtctcggttcactcaagccaacagatctacaccagggcaacaaa

SEQ ID NO: 13985 - DNA, 413 bp, Zea mays
  Clone ID: LIB3159-010-Q1-K1-B10
cggacgcgtgggcgcatccacaacctgcctctctcgtcccctggcggcgtccgcggcaggatggcggaatctacggcgaggacggtgaaggatgtcaacccgcacgagttcgtcaaggcctactccgcccacctcaagcgctccggcaagatggagctccctgagtgggttgacattgtgaagactgcgaggttcaaggagcttcctccttatgatcctgactggtactacatcagggctgcatccattgcaaggaagatctacctaaggcaaggcatcggtgtgggtggctttcagaagatctacggtggccgccagaggaatggctcccgcccaccacacttttgcaagagcagtggtgctgttgcacgcaacattctgcagcagctgcagaatatgggcatcatctatgt

SEQ ID NO: 13986 - DNA, 400 bp, Zea mays
  Clone ID: LIB3159-010-Q1-K1-B11
tgtcaacaagattttggttggcaacaaggccgatatggacgaaagcaagagggctgtaggtactgcaaaaggacaagcacttgctgatgagtacgggatcaagttttttgaaacgagtgcgaagacaaacctgaatgtggagcaagtgtttttctccatcgcacgtgacatcaagcagaggcttgcggagactgattcaaagccagaggacaaggcaatcaaaattaacaagccagaccagggttccgaggcaccagctgcccagcgatctgcttgctgcggctcataagcagatgcacgatggccatagcctttggttatttgacattatttatttcccgcttggctgttataggaaggatttgaagaaaccacttatgatataccgatgtggttgtac

SEQ ID NO: 13987 - DNA, 354 bp, Zea mays
  Clone ID: LIB3159-010-Q1-K1-B2
agcatccagcggagccacaccacaccacccttggtccggcactagcactagctatccaggggagacgaagatggcgacggcgcggtggctgcaggttgccgccatggcggtggcgctgctggcggagtgggcgacggcggcggcgcctcggaagcccgtggacgtgccgttccagaagaactacgtgccgacgtgggcgcaggaccacatccactacatcgacggcgggcgggaggtgcagctgtacctggacaagtccaccggcacgggcttccagacgcggggctcctacctcttcggccacttcagcatgcacatgaagctcgtcggcggcgactccgcgggcaccgtcac

SEQ ID NO: 13988 - DNA, 326 bp, Zea mays
  Clone ID: LIB3159-010-Q1-K1-B4
gttggcttctcctccccctccggttcgggttcgggttcgtgaggttctccggggttgggattcgtgggtgagcggatcgagatggcggcttctgatgttgagtaccgctgcttcgtcggcggcctcgcctgggccacggacgaccactccctccacaacgccttcagcacctacggcgaggtcctcgagtccaagatcatcctcgatcgggagacgcagaggtcccgcggcttcggcttcgtcaccttctccacggaggaggcgatgcggaacgccatcgagggcatgaacggctaggagctggacggccgcaacatcaccgtcaa

SEQ ID NO: 13989 - DNA, 313 bp, Zea mays
  unsure (1)..(313): unsure at all n locations; Clone ID: LIB3159-010-Q1-K1-B5
ctgttnaaaagtgcctgaaggatgccaatatggacaagagcaccgtccatgacggaagacttgttggtagctccactaggatccccaaggtgcatcaactgctccaggacttcttcaacggcaaggagctgtgcaagaacatcaaccccgatgaggctgtctcctatagtgctactgtccaagctgccatctctgagcggtgagaggcaatgataaagtgcaggacctgtctttgctgagacgtcacccctctatccctgggtctgtatactgctttatgatttattacagtgcttattccgaagaacaccac

SEQ ID NO: 13990 - DNA, 289 bp, Zea mays
  Clone ID: LIB3159-010-Q1-K1-B7
aagcctccgacccccttctctctccctccgccgccgatggcacgctaggaaagagcgacatgggcgtctacacctttgtgtgccacaacaactgcagcgagtggaccgccaagcagcactccggcgagatcgaggcttccgccgctaccccatacgagctgcatcgccacctcgtcattgccgcctccgccaccgactctgactacggcgtccaggcctccttcttcatggtcacccccatctccgacgagttccaagtgatcgtctgtgctgtcggtggtggcgcatt

SEQ ID NO: 13991 - DNA, 376 bp, Zea mays
  unsure (1)..(376): unsure at all n locations; Clone ID: LIB3159-010-Q1-K1-B8
cagagccatcccgttcaagagcaggtcttaagctgccgtggccgtgccgagacatgccggtccgaagaacgggcgtcttcctgtgatgtcttcttgtctgcccacgcctagtttctctgtcgattcctattcgtcgtctcttcagggctggtgctcactgctgcgccgttctgttaaccgaaacaagaactctgtgtattcctgtaccgagctgtgcatgtttttttctttccatcgtggagaatttaagttattatccgtttgctgcaaggtttgccgtctcattttatgcgttgggatgttggcaagaaagggcagatgtcatgtgagaatttaagttaagtgaaatcgattcanggttttcttgggttcaaaa

SEQ ID NO: 13992 - DNA, 131 bp, Zea mays
  Clone ID: LIB3159-010-Q1-K1-B9
acgccgagctcaatgagatgctgacgcgggagctggtggatgacggctacggtggcgtggaggtgcgcgtcactccgatgcgcacggtgatcatcattcgcgccacgcgcacgcataacgtgcttcggcga

SEQ ID NO: 13993 - DNA, 245 bp, Zea mays
  Clone ID: LIB3159-010-Q1-K1-C1
gtctctcccactccttagatgtccgatgacgctgacccacctctgaattctactaggggtgcgttgcccttgtccctcttatccacatagcgaggagctcacatgttgcccttttcgtgttgaccttgccacccccgtctctaacatgtaatccccgaccacgcccctccagacggaccctacgaagctggtcatcagccactacacctaggcgatggtgaaccatggtatgcactaactcttgg

SEQ ID NO: 13994 - DNA, 393 bp, Zea mays
  Clone ID: LIB3159-010-Q1-K1-C2
caaccgcccggcccgacattccctccaaccgccgctgcggctgcgccgcccaccgccggcaggcgacagcatcgacaggcgcagcagtcaacaggaaccgagccatggcgagcgcggatctgctgcggagggaggaggagttctactcctccctgtttgattccgccaaaggcgatggcgccaggtcgcgctcacagctgatcgagaggaagatcgaggccctggaggacatggccaccagggtcagtaaccggagatcgcggaagtggtttaacgaccgtttgctgattgaactcgtcccgcgtctttacgttgaagagatcaaaggcctattcgctcctccgccgtggggtgagcaagtgcccttgtcagcattctacaaggcaaatggtg

SEQ ID NO: 13995 - DNA, 384 bp, Zea mays
  Clone ID: LIB3159-010-Q1-K1-C3
gcaagcagagcgagcgagctgtccggccaaaccctcacggccgcctccacaatgccgggccgtctcgcgctgctcctgcccctgctcctgctggcctcgccggcggccacgcgcctggcgtccgccgcctgcgcgggcgagaagttcccggcggggcgtgcgtacgcgtcgtgcgaggacctgccgaagctgggcgcgtcgctgcactggacgtacgacgcgtccaagagctccctgtcggtggcgttcgtggcggcgcccgcggcggcaggcgggtgggtggcgtggggcctgaaccctacgggcgagggcatggccggcgcgcaagcgctggtggcgcttgcgggggccggagccggtgcgcccgccgtgcggacgtacaac

SEQ ID NO: 13996 - DNA, 344 bp, Zea mays
  Clone ID: LIB3159-010-Q1-K1-C6
cagaaaactagggttttgctcttggaatctctctccccgctgccgccgccgccagacagtgcaccgacgatacgacctcctccttcctccgatctggcctttttaatccgcggatcccgtacaagatgcttcccctctcgctcctcaagaccgcccaggggcacccaatgctcgtggagctgaagaatggtgagacgtacaacgggcatctggtcaattgcgacacgtggatgaacatccaccttatggaggttatttgcacctcaaaagatggtgacaagtttttgaagatgccagaatgttacattcgtgggaacaccattaaatattctttcagttcctga

SEQ ID NO: 13997 - DNA, 306 bp, Zea mays
  Clone ID: LIB3159-010-Q1-K1-C7
cggacgcgtgggttcttcacttatcttcactcggctctgcttctacacatctatagagggttagttcggcaaagaaaagaggctacgacgattgctgctgcggcggcgatgatggtctccggaggacgggcggcgctggcagtgtcggacgtgctctgcgcagcggcatgccatggcggcggctcagcaagcgtctaacgtgcgggcgacgtaccacctgtacaacccggctcaaaacgggtgggacctgaaccgcgtgagcgcgtactgcaccacgtgggacaccgacaaacccctgtcgtggcg

SEQ ID NO: 13998 - DNA, 263 bp, Zea mays
  Clone ID: LIB3159-010-Q1-K1-D1
gtaaatcataaagtcctggttctgcaatgttggggaacaggctagaaagcagacctatgtcggcatcaccatccttcaactcaagtttggtggcatataaaaggaccggccaaaccgttaatccgggtgaaatggaaaaaaccccacctagatttggtgaatcccaaattattggggagggtgggtttgggcctgtctattaagggattcttgaagattgaaaaccggttgcttttaaaggttttaaaccggaccatccacca

SEQ ID NO: 13999 - DNA, 331 bp, Zea mays
  Clone ID: LIB3159-010-Q1-K1-D10
gcggtgacgcgtcccggccccggcggccggtgggtctgcctaccggtaccggcccgcgtggctcgtcgagtcaacggcttgactgctcccgtccgccacgttcgtattactatacaagatactgaactgccatctcagttaaatgatatactgcacaacattgggcatcgatagtttgagacacattatcaatgagttgtttttctcaccttttcaagagataaagggtgccacaacaacaagactatccatctgacaattatttcactggttctgagaatataacaagaatcatctacagggaactggttatagccacattatattttga

SEQ ID NO: 14000 - DNA, 351 bp, Zea mays
  Clone ID: LIB3159-010-Q1-K1-D2
gagatgttgctgatcttgacttctattcagtccctgctggtgatcctaacccgagagtcctgcaactcagaagccgcaagactgttcacgagaacaagcgggagtacaaccgcaaagtccgcgagattgggagcagagctggacagccgactagtgcaggaggatgctcatcgtgcccgaaagggcacaataaggaaccatgaaaatcatccttgtgtttgtggttcgcagacctgtcgaaacattgaagaactctagttctagtctgtcgtgcatggtttggtctgaccagagcaccggtgctatggtggggctgtcgaatgtaccggtggtgtgacatatatctttaaa

SEQ ID NO: 14001 - DNA, 366 bp, Zea mays
  Clone ID: LIB3159-010-Q1-K1-D3
agcgcactctagcaatggcttctgaggttgtccgccctagcgacgccgagctactaaaggcacaagccgacatatggcggctcagcctctcctacctcacgcccctgtcactgaagtgcgccgtggagcttggcatccctacggcgatctaccgccatggcggggctgcctcagccgctgagctggtcacggcgctgtctctcccctccactaagctgccgttcctccgccgcctgctgcggctcctcgccgcgtcgggcgtgttcaccgtcgacaagcagagctcggaggaggagcggtaccgcatcagccccgtgtcctacctcctggtggacggcatccctcacgaggaccacatgaaccaca

SEQ ID NO: 14002 - DNA, 234 bp, Zea mays
  Clone ID: LIB3159-010-Q1-K1-D4
tgatgagcacacatctatcatgagcatacgccggctggtgcaactactacacgcctacgaggtgaacaagtagagtacagagaagaccacactgttcactcgacggacggacgaacgaatggatggatctgatggtagtacacatgtacggcgttgctcagtcagttagttgccggggacgaatttcgtggcgtatgcccaggcgttgttgtcaactgtgtctgctacgtggtc

SEQ ID NO: 14003 - DNA, 433 bp, Zea mays
  Clone ID: LIB3159-010-Q1-K1-D6
agaagtttcaactgctcaagctatacttgcaccaatatatactcaaagaagagagggagaggatcttggggtgcattattcaagaagcagcagcggaagattcaagtgaatggcataagcgacgatttgctcaaggaagctgcaaggaggatcgatggcttctctggcagggagattgcaaagcttgtggctagcgtgcaagctgctgtttatggccggcctggctgcacattggatccccagttattttcggaggtagttgactacaaagttactgagcatcaccaacgcatcatgcttgcttctgagggtatggcttgatcaataagaaatattttacctggaagccacaagtttcaagctatcaaaaaatcgggtttgtgatgaacgacaaaactgacaattaccttccactgacttgtaatcatgtttt

SEQ ID NO: 14004 - DNA, 392 bp, Zea mays
  Clone ID: LIB3159-010-Q1-K1-D8
gccggtaccgatgaactggccgagttctaagtagagaatcggtttttcttgtcagatgccggtgtctgctgcgtctggtggtggttaatgggagaaattcgcgagatctgttccggatcaagcgtgcgagctcgggaatcaagggtttcacacatagcttcgtcgatttgaatttgatgtactaatggagtctaagggtggcaaaaagtctagcagtagtcgttctatgatgtatgaagctccccttggctacaacattgaagacgttcgacctgcctgatgcgtgaaaaatttccaagctgttgcttactccaacttctcgtagaatccattcttgttatccttttggctttctcattcttataattaaagattttttttctgacactttt

SEQ ID NO: 14005 - DNA, 338 bp, Zea mays
  Clone ID: LIB3159-010-Q1-K1-E1
cattgttccaggaagtggtgcggcatatgtgcacctatctacggttgtccctaagatgaaagaagcaattgaggaccctgatgagcggcttggcgctgatattattcaaaaggcattggtagcacctgcttcattgattgcacacaatgctggagtagagggtgaagtggttgtcgagaagatcaaggagagcgattgggaggtgggctacaatgcaatgactgacaagtacgagaacctgatggaggctggtgtgatcgaccctgccaaggtgaccaggtgtgcgctccagaatgcggcctcaatagctggaatggtcctaaccacgcaagccattg

SEQ ID NO: 14006 - DNA, 169 bp, Zea mays
  unsure (1)..(169): unsure at all n locations; Clone ID: LIB3159-010-Q1-K1-E11
ggaaaaanngggcgcgcgcacgcgttcgctcgcatttttcttgcttccgattgcctattcttctcccaacccaagaccgatgtcgcgcaaggtttatattaagcccgcgtctaataatcctttttattatgagcccgctgcttttattactacctccgttaataatccc

SEQ ID NO: 14007 - DNA, 201 bp, Zea mays
  Clone ID: LIB3159-010-Q1-K1-E12
aaaaaaccgccgacccactcatacgtatctatttatcttcttatcaatattttctcttcccaaataatattattcattcgctgctttattttaaaatcctatcccacccaaaaaactatcacatcatataatttaaatttacactacactaattacttatctatttaatatataacaactcatcattcttatttattactt

SEQ ID NO: 14008 - DNA, 340 bp, Zea mays
  Clone ID: LIB3159-010-Q1-K1-E4
cggactcgtgggcgagcacggatctcatctcaccagctgcccgcgcatccaattcctgtcgctggacggctgcagcacatcatcaggtgagaccgtgagagggaatgggatcaacaacaatgtcccctccatcttttcccgtcgtcctcctgctcctcctcctcgccaccatagccgcatccgccggaagcaacatggatgaggaggtggtggacgacctccagtatcttattgacaactccgacgacatccccaccaacgatcccgacgggtggcctgagggagactacgacgacgacgaccttctcttccaagatcaggaccaggacctcacatgcca

SEQ ID NO: 14009 - DNA, 361 bp, Zea mays
  Clone ID: LIB3159-010-Q1-K1-E5
cttttcaccatgagctggtggaaaaatcaagaatccagccgctgcacatgtcaagggagcagccagagatggctgttccatcagctaatggtgatcttgacatcccagaatcagtggggctttccgctccccagccattcctcaaaagacttgttgaggccgagccgatgaggcgcagtaccaggaggcggcggtagtaatgaaactagtactgtaattaatagcgtaccgaatttgttgggtaagtgttgttatgacttgtaacttttagcagcttaggtttttattttcttttagttgttgagttgattatgtgcatctcgggttagaatttatagatttggaaaactggtggaacgac

SEQ ID NO: 14010 - DNA, 390 bp, Zea mays
  Clone ID: LIB3159-010-Q1-K1-F2
attattgctatcttgggtatggatgagctcagtgaggatgacaagctgacagtcgccggtgcgtgaaagattcagcgtttcctgagccagcctttccatgtcgctgaagttttcacgggtgctccaggaaagtatgtggagctgaaggaaagcgtgaagagtttccagggtgttttggatgggaagtatgatgacctccctgagcagtcattctacatggttggtggcattgaggaagtcattgctaaagctgagaaaattgccaaagagtctgcttcataaggaggcttcttgcttgttcaaccctgtacaagttccatttttggattttaaagcgttatttatgcttttcccaactaggcatgacgagctggagaggccatcttctgc

SEQ ID NO: 14011 - DNA, 287 bp, Zea mays
  Clone ID: LIB3159-010-Q1-K1-F3
cggacgcgtgggtccaagttgatacaaccagtccatctcctgtccaattgagctctcgattgcccgctatccaggagcatgtgttacaaactcgaccatcggcaccggtgaatgaattgcaacctgtgcaaattgagtgcttgcctgagggatctgtaagcacagctggaactgcaacggagaacattcagcaagccccgcagagttcaaaagatatccaaagcaagtcccagggtgcttcaacaaggagctgtacaaaggttcataagcaaggagtcgcacttggc

SEQ ID NO: 14012 - DNA, 424 bp, Zea mays
  Clone ID: LIB3159-010-Q1-K1-F4
ctcacgtgacagtgatctttaagagaatcctttgataactaaagaacttacaaatttgggagccccttgataggatgaaaatgtccgtttgtctccaccccgattgatgagtttggaagaggcaattggatatgttgctgcagatgatcttattgaggttactcccaaagtcgtacgtcttctaaagaagtacttgtattccacttagcgttagatgatgaaaaaacaagcctatgaattataactccagagacaacatatttacattaagcactgtcagcactactatataagtttatcatgctaaacttttgcatcaataatgttgctttctcttgcatctagaaaaatcatttatgtatagggtggaggttaaatgttctaacctgatcttttttacctttttctttacccaattttttac

SEQ ID NO: 14013 - DNA, 251 bp, Zea mays
  unsure (1)..(251): unsure at all n locations; Clone ID: LIB3159-010-Q1-K1-F5
ctgactntttttccacatgccggacatggacggcttcaagctcctcgagcttgggagactcgatatggacctcccggtcattattctgtctgcatatggggagacacagacagtcatgaatgggattacccatggagcatgtgactacctgcttaagccagtgcgtattgagcagctgatgactatatggcagcatgttgttaagcagaagaattgtgacgccaacaacaatggctattacaacgattatt

SEQ ID NO: 14014 - DNA, 357 bp, Zea mays
  Clone ID: LIB3159-010-Q1-K1-F6
ctcgtcccaagatgaaagtgtgcatgcttggtgatgcccagcatgttgaggaggccgggaagatgggacttgactacatggatgttgaagctctcaagaaaatgaacaagaacaagaagcttgttaagaggcttgccaagaagtaccatgctttcttggcatcagaggccatcatcaagcagattccccgtctccttggtcctggtctcaacaaggcaggcaagttcccgaccctggttactcaccaggaatccctcgagtccaaggtgaacgagactaatgcaaccgtcaagttccagctcaagaaagttctttgcatgggtgttgccggtggcaacttggcgatggatgaaaaac

SEQ ID NO: 14015 - DNA, 302 bp, Zea mays
  Clone ID: LIB3159-010-Q1-K1-G1
gggagccatgcctgcaagtcatgcagcaaatctttcggcagtgcgtcagcacttgagatgcaacattagcaacattcgacgacgaccaaaactgggccagcaggacctgttctaacctgacatttcccatgttcttaaccaggcataccgcgtatgtcccaaactagacaattcccaagttcaaagaaaaataacaccactaatcagatgactactgggcaagttccaaacttggacattttcaagttcaaaaataaaaccactgattttgataacgagtagattgtataacacgtgctcta

SEQ ID NO: 14016 - DNA, 242 bp, Zea mays
  Clone ID: LIB3159-010-Q1-K1-G3
ggaaaaatctccccatcccctgactatcactggctcactgcccttccacctacaagaagcaggttaagtttaagattgataaaaattgccgtcctctccctgaaagtagtctcaagcaagccatcaaagaaaattacaatgcaaagagcaaatttgatccaaagctcaccacaaaacaaatccaaaagttactttttctgtttaaacctgttagtgcacctcaatctgttttaaataatcac

SEQ ID NO: 14017 - DNA, 393 bp, Zea mays
  Clone ID: LIB3159-010-Q1-K1-G4
gaaaactaagtaccctaactccgacctctactggaagaagtttgaggatcactaccacttggggtgccagttcaccactgacttgattgcaatgaaccatgccgacttcatcatcaccagtaccttccaagagatcgccggaaacaaggacaccgtcggccagtacgagtcacacatggcgttcacaatgcctggcctgtaccgcgttgtccacggcattgatgtgttcgaccccaagttcaacatcgtgtctcctggcgcggacctgtccatctacttcccgtacaccgagtcgcacaagaggctgacctcccttcacccggagattgaggaagctctgtacagccaaaccgagaacacggagcacaagttcgttctgaacgacatgaacaa

SEQ ID NO: 14018 - DNA, 167 bp, Zea mays
  Clone ID: LIB3159-010-Q1-K1-G5
gacccacgcgtgcgagtcactcccgcagactatgtcattaccttcgcgccgtcaccgtatcctcagtgagaggcgttcttaaaccataccactctactaacgcccgaccaggtacactttctctcacccgctttttttcctttttttttccatccacaaaatacttt

SEQ ID NO: 14019 - DNA, 203 bp, Zea mays
  Clone ID: LIB3159-010-Q1-K1-G6
tgcggagccttctgggttgacacccgttttacagaatgatatgcaatcatgccgggagaaagcaaggactagtggttggtcatcaatggatcggcgtcgtgccccactaccaattacaagtgtggggacattatctaagcagatagcaccgatagggaatgatgctactgtttctagagatgctgtgatatctgaaccaattt

SEQ ID NO: 14020 - DNA, 339 bp, Zea mays
  Clone ID: LIB3159-010-Q1-K1-H1
atcgggacatttcaacagattatagacacatttcatcagatgaagaaaaatgagcaaggtaggaatgcttatctaacaataaagaatcactaagcataacccaatcccccgcccacctccttccttcctcctctaacataccacccaaaatttctggctttagtttgttatacagctagcaacctcttgtcatgtccaaaagttcgaatccaccacgatagccaccgcaatgctaagtaccaaccgaaggaagagcaacagccctttgtccctcccagttcttagtctccatatcgcagatccctcagcgtcacttgtaggcgtcgaaaatgtgttcgt

SEQ ID NO: 14021 - DNA, 388 bp, Zea mays
  Clone ID: LIB3159-010-Q1-K1-H10
ggtgaggctatgctttatactattgggtttatttacgtgcggcaagcagcaagagagggggggaaaagtagaatttatatgggtgtaccgtttatagctgagtgggttagagacaaaggacaccacattaaatcacaggttaatgctgcttcaggtgctatttctctaatacaacttcaagaagggatgaaaaagattgaaggaagcgagaacagtgaagagcaacttatgaagagttttgaggagaaaaaagatgccatgcttagctcgctatggaaaattaatgtggttgatattgagtcaacactttcacgtgtctgccaagcagtttctgagagataacactgtctccaaagatgttctgaagcttcgagcgaaagcgttgaaa

SEQ ID NO: 14022 - DNA, 359 bp, Zea mays
  Clone ID: LIB3159-010-Q1-K1-H12
cagatgtggccgccttcaaattccgaggtgcatgggctccctttcccaatgaaccggggctggagtacccttttatttattagggctttgtactttggtgtctgggtctttcaagtgctactcatcttgttttaccgaggagagagggtgagaataatagcgcccggacaaggataaataagtttgggttgctttaaatttgttttaaagtagtattaatcaaaaatcattttttttttgtttcctgactatgtaccttggacttgtttatgtactgatgcataaggctatcttcgacagctaattatcataattattttttttatcattactttgttattatatttattttaattatt

SEQ ID NO: 14023 - DNA, 341 bp, Zea mays
  Clone ID: LIB3159-010-Q1-K1-H2
gccaacgggttcgagatccggcggtacacggacgccatgtggatcaccacggcgcccgtcgaggacatctccttcgtcgccgccacgcgcaccggcttcctacagctgttcgactacatccagggcaagaacgcgtacaaccagacgatcgagatgacggcgccggtgctgacgcgggtgtcgcccagcgacgggcccttctgcgcctccgccttcgccgtgagcttctacgtgccggccaagaaccaggcggacccgccgccggccgatggcctgcgcgtggaccgctgggccggggccaggtacgcggccgtgcgccgcttcgggggctttgtggcgga

SEQ ID NO: 14024 - DNA, 397 bp, Zea mays
  Clone ID: LIB3159-010-Q1-K1-H3
ctcatgctcttccctaatgatactagactggacactataggtggcagtgcaaaatggagtcttaaggattcttgcacagctgctgatgtgcatgttgcagttggctacccttcaacatttcgtttaaagtatggttggtttggacctgatttgaaccaacaaagtagtgaaccatccttggcatcagcgtactctgcagacaagattattggcagcaggcctcctgatcttgttttcaatgaacaaaaacatatggctggttcagatgaatttgcaaatcattttgtgacaccctccattgtggatgaaataaatacatcacaaatggcggagaatccaagcaaggtggcacaactttcatggcttgactccatatctaatattaagtttggagcac

SEQ ID NO: 14025 - DNA, 341 bp, Zea mays
  Clone ID: LIB3159-010-Q1-K1-H4
gccctatgcaagcagcaagcgcacacgtaaacgtacacctacctcggcgagcaaaagaggaaggcgctgatcggagcaacgaagcccgcatccatgccgacggcgacggccacggccacggcagctcctcgccacgcggcgctcttcctgcccctgctgctgctcctgctcggcctccacgccacgtccgccgccgccgcgcgcgcgggcgtcgccgtggacgccgagctcacgtccaccaagccgtccccggtcccgaagaagcccagcgtgaatgccgccggccccggcgccgcgagcccgaccttcccaggcttcagcatccccgggatgggcgggtt

SEQ ID NO: 14026 - DNA, 358 bp, Zea mays
  Clone ID: LIB3159-010-Q1-K1-H6
cgtgcgctgcaatgtacagtggttgaaaatgattctatacaggaccaggtcaaaatcataaagataggcttttatgaaataaagaaccaatgaccggctgttagatctaagattaaagtcctggaggatgagctaaaacttgttgatgctgagattgcatcgcttcaagaagatttatatgcagcaactgccataaaggacaaggcatatgaattgttgcaagaattgagagcaagtcgcgatgcgaaaaacgcacccttcatgcaaaatcgtacagttttagccaaagctagggattattctttgaggaatatgctttcaaaactgcaagagctccacaaagctgaagtcgacaaat

SEQ ID NO: 14027 - DNA, 425 bp, Zea mays
  Clone ID: LIB3159-010-Q1-K1-H7
acgcgtccgataagatactatctgataaaggggttcttcaaaaaggaaatctggaggacagaaggaagtccctgttttcctctgccccggtgatgcttttcatgaagggcaccccatatgctccacgttgcggcttctgttcgaaagttgtgaacgccttgaagaaagaaggggtcagctttgggtcctttgacatcttatctgacgaggaagttcgacagggtttgaagacatactccaactggcctaccttcccccaactctactacaagtcggagctgattggtggctgtgacatcattcttttgatggagaagaacggagagctgaagtcgaccctgtcaatgtagacacccaaccttacattcttgcctctcttgcgtttctattatattggctgcattggatcattctactttgacctt

SEQ ID NO: 14028 - DNA, 476 bp, Zea mays
  Clone ID: LIB3159-011-Q1-K1-A1
gaacacgctaacaagacaacaaggatcatggggcgtggtcgcggccacctcctgctgcacgcgtgcactcacagagctggcgcgggcgccggcggactgctgagggtcgggctcaccaggcgcggcggagggctcgaccagtgcgcgctggcggcggccaacgccgcaaggcagcaggacgcaagccgactcgtggcctccggcggcggcgacatgcctgtagtggactacctcaacacccagcactacggtgtcgtcggcatcagcacgccgtcgcagaacttcaccgtcatcttcgacaccggcagctccaacctgtgggtcccatactgcagatgctacttctcgattgcctgatacctgcacgacagatacaagtcggccaagtctagcacgtacaaagcggacggcgagacctgcaagatcacctacagctccggatagatcgccgggttctacagcgacgacgacgtgct

SEQ ID NO: 14029 - DNA, 246 bp, Zea mays
  Clone ID: LIB3159-011-Q1-K1-A10
aaggcggcccccaactacaaccctttcctttaaccccaacccccaacccaggggggccccacaacaacggtgggggggggggccgaacccaagattaagttttccaagccgcggcttcattccccgcccttgcggaacctcaacccggccaaggccaagggcctggccgaaattggcggtcctgggcccaacggccagccttcctggaaccggtattccccgaccaagccgttccctccttgccgg

SEQ ID NO: 14030 - DNA, 289 bp, Zea mays
  unsure (1)..(289): unsure at all n locations; Clone ID: LIB3159-011-Q1-K1-A11
atgaagtgtccgaagcggcggctgcatcccccgccctgcggcaccgccacgcgggcaagggcgatgggctgggcggcaatggcggcgctggggccgacggccaggcgtccgtggagcggttgttcgcggacaatgcggtgccgtcgtggcgggagcagctcacgctgcgggcattcgtcgtcagcgcgctgctggccgtcatgttcagcgtcatagtcatgaagctcaacctcaccacngggatcatccccttcctcaatgtctccgcggtgctgctcggcttcttctt

SEQ ID NO: 14031 - DNA, 463 bp, Zea mays
  Clone ID: LIB3159-011-Q1-K1-A2
ctaggggattacttgggttgctatgtggtatacttggacccatcaaggcttatgcttcagaggtctgcaggaaagagcaccaagctttgggaatctctcttgttacatcttcacgagccatagctcttgttattgggcctgctattggaggcttccttgcacaggattccggctctcatcaagtgactccttcccctcacgttgactttgcgaacagatgtctcaattctagtggtggagctacgaacaacaatccgatgtcctgatcgagagcgatggagctaatgtttgaacttgtgtgtttgaacttgtgaactaaaaatgtgaactatggatgtgaacttgtgtgaatttgtgaacttatgtatttagacttatgtgaatttgtgaacttatgtatttggacttgtgtgaatttgtgatatgaacatatatcaatgtgtttaaaatttgtaggtatgtg

SEQ ID NO: 14032 - DNA, 361 bp, Zea mays
  Clone ID: LIB3159-011-Q1-K1-A3
gacccactcctccggttcaagctatatcgaggtgtgcctgtctctagtcatttattatggtgtttaggagtgggctacacagttcgtaacggtgtatcgtggatgcatgttgccgcgagcagagtacgtaggcatgaaccgatgtgtgcgcttctgtctgtttactctctctatgtagtaatgtgtgggtgctttgatccagatgtattcgctcgtgagtcgtggaagtagatcgtttcagtatcattaccgtgtgttctttcttaattgtacattcgattctgaataaaactaatgtatgaacttgtgtgtttgaacttgtgaacctaaaatgggaactatagatgtgaacttgtgagaa

SEQ ID NO: 14033 - DNA, 486 bp, Zea mays
  Clone ID: LIB3159-011-Q1-K1-A4
caagtgtatctgcacagatttttggtcagagctgttcaagaagcagattgacaatctgaaggcggatcacaggggtacctttggccttcaagataaccgttttcggtggcttactcgtgtttctctagatccacgtacagagaacacagattcaactgaaaatgattctgcagcattgggtgatactgcagcccaaacgactaccatgcttctgtatttcccatgcgggttgataagaggtgccttgaccaacttaggaatttcgtgttctgtctctgctgacatgtcaaaccttccagcatgttcgtttgtggtgcgcataaagacatgaactgtgaggaatgatacaagtacagtacgaagattcgacagtatctgcttgtggttcaagccgggttgaacattgaagatagcagagtttgggcatgcattagatgtattgtggtactgcagaaatattctgtgtagctgttggtttctgtttcc

SEQ ID NO: 14034 - DNA, 382 bp, Zea mays
  Clone ID: LIB3159-011-Q1-K1-A5
ggctcgggcgctggaacgcacctgcgccctacgcctctatccgccctccatcgcctccaccgcaggccatagagcccgtcgtgcgccgcacctagcgccttcggctccggtcacaggccccgccggaccgcccgcaggctgcagcgccgcgccgccggccgccgcagcagtcccgcgcggtcgcgcagttctggtcgtctggtctggcctgatgcccgtagcgctgcgtgcccgcctgagaccctgagtaggactgtaggagactaggaggtagtagcaagcagcagcgtgctccgcggctccgcactccgctggtctgcttgagatttgaagagttatttcggtcaaggttctagtggaagtggaccaagcactcgtgcta

SEQ ID NO: 14035 - DNA, 472 bp, Zea mays
  Clone ID: LIB3159-011-Q1-K1-A6
gagcgagccaccgcccgagagagagagagagagttagagagagagagggagagtgagagtggggattcaagtttcaaacgcggtatcgaggggggataggaaggtggtcactcatcggtccacagctagctcgtcgccccccatggctgactggggccccgtggtgatcgcgacggtgctgttcgagctgctcacgccgggcctgctgttacagctgccggcgcacggccgcatcgtcggattcggcaccatgcacaccagcggcgtcgccatcctcgtccacgccggcctctacttggtgctcattacgatcttcctcatcgccatcggcgtgcacatctacgccggctagctagggccgggtgtcttctagtccacaccccctacgtctcttcctctcatcatcggcccctgctagcttcctagtcatgtactactactagccttcgttgggcggatgatgcgcgcatgc

SEQ ID NO: 14036 - DNA, 338 bp, Zea mays
  Clone ID: LIB3159-011-Q1-K1-A7
ggctgactaggcgggcgccagccacgtacggttttctctgtgtgtttgcttgattgagtggttggttggttggttggttgagaaagtgtaaaagtagtggggccgggtggggtgtacatgcatgcatgtaaatacaggtgtgcatgctcacgacttttgagctagtgagctgtggctttgaaacactgtacatttctctttgtgggcttggcgttgaggaatttgggatttgagactgaccatgatttagaatgtttgattctattatgtataaaaaagcagcagcgtgctcactggctccacactacggtggtctgattgagatttgaagagttatt

SEQ ID NO: 14037 - DNA, 482 bp, Zea mays
  Clone ID: LIB3159-011-Q1-K1-A8
cagcatgcttgctcagaggctgaacatgagctactatgaggccgagttgtggataatgaacttggttaggagctcaaaactggatgcaaggatcgattcagtgtcaggaactcttatcatgacaaccaatcacatcaatgtgcatgagcagattatcgagagcatgaagggccttaacatgcggacctacatgctcgcaaagaacatcgtggagccagctcagcaggcagctcggtgaggttagcggagtacagttttgaggcgccaagaactagtttagaggtagaggtctattgtgtggcagtgaattcgtcaccgggattgaacacatgggactgggaggtggcttgccgtttggtacagcttagtatgctgacattttcaatattttgtactcggaatttcgtaacagtttatccttctcaatgtatattactattgatgcctgtttggatcacattaattgaaacaaatatctagaa

SEQ ID NO: 14038 - DNA, 383 bp, Zea mays
  Clone ID: LIB3159-011-Q1-K1-B10
atgaagggcaattgctacccacctcactgcttttctttggactcctgtctaatgctcgggggggctgttatctcaagggatgggaatactgacgaaggcatcataaacaatacactctctatacatggtattaactgataccgacttagatatagctgcaatttaaactacctaaacactagaatcttgcctgcttacaactcctctagaggacatgaaacgggagctttttaatctaactgatcaacatgtaaaagaagtgcctagctgatagtctacttgtgaatctcttatgtcaaaactcgtagcatcagacaatgcatgccttagatatgaaaaagaatacggcgaattttataatgaacttgaattacagttgtcaa

SEQ ID NO: 14039 - DNA, 443 bp, Zea mays
  Clone ID: LIB3159-011-Q1-K1-B11
cgcagagataggcgtcttcgtactcgcctacctcctcgtctcaaacctttcccccttctccgaaggccttccgccgggcggcgctgcacccgtacgacgacaccatgagggagtgcatttcgatccacatcggccaggccggtatccaggtcggaaacgcgtgctgggagctgtactgccttgagcatggcattcaggctgacggtcagatgcccggtgacaagaccattgggggaggtgatgatgctttcaacaccttcttcagtgagactggtgctgggaagcacgtgccccgtgctgtttttgttgaccttgaacccactgtcatcgatgaggtgagaactggcacctaccgccagctcttccaccctgagcagctcatcagtgggaaggaggatgcagccaacaactttgcccgtggtcactacaccattggcaggaga

SEQ ID NO: 14040 - DNA, 482 bp, Zea mays
  unsure (1)..(482): unsure at all n locations; Clone ID: LIB3159-011-Q1-K1-B3
gcgccgccgctcgcctctccgaccgccgcgagaatgccgttcaagaggttcgtggagatcgggcgcgtggccctggtgaacgacggcaaagactatggccgcctcgtcgtcatcgtcgatgtggtcgaccagaacagggcacttgtggacgcccctgatatggtcaggtgccagattaacttcaaacggctctcacttactgacatcaagattgacatcaaacgcgttcccaagaagtcaaccctgatcaaggctatggaggaagctgatgtgaagacgaagtgggaaaacagctcatggggcaagaagctgattgtccagaagaggagggctgcgctcagtgactttgacaggttcaaggtcatgctggcaaggatcaagaggggtggtgctatcaggcaagagctcgccaagctgaagaaggcgtccacggcttangtcccttttggtggatggcatgttagttnttgggttcatgttgc

SEQ ID NO: 14041 - DNA, 405 bp, Zea mays
  unsure (1)..(405): unsure at all n locations; Clone ID: LIB3159-011-Q1-K1-B4
gcgaggtggtgtccaacgcggtttccgatctctgttctctgcttgccgtcacgctcgttcggggcggtatccaacctgtgctggcaggtgtcgccgttgggtgcgggtggcatcagttcgtggcctacgtgaacattggctgctactacatagtcggcgtccccctcggcgccgtgctcgggttcgtcttcaagctcggtgtgaagggcatttgggctgggatgatcggagggacctgcatgcagacggctattctagtgtggtcaccttgaaactactgaacaggaggtaagaacacagatatgtgccagtggagctacagacangaccctttgcgggtacatacaaaatactactgcccgtatcacatcacatatatcattcgctacatctatctatctatgt

SEQ ID NO: 14042 - DNA, 416 bp, Zea mays
  Clone ID: LIB3159-011-Q1-K1-B5
agagaaggaaaaatatccccaaaccctagctccctatctcgatggcgaaccctcgcgtggggttcgacatgaccgtcggcggcgccccggcgggccggatcgtgatggagctgtacgccaacgaggtgcccaagaccgcggagaacttccgcgcgctgtgcacgggcgagaagggcgtgggcaagtccgggaagccgttccactacaagggctccaccttccaccgcgtcatccccgagttcatgtgccagggcggcgacttcacccgcggcaacggcaccggcggcgagtccatctacggcgagaagttccccgacgagaagttcgtgcgcaagcacaccgcccccggtgtgctctccatggccaacgccgggcccaacaccaacggctcccagttcttcatctgcaccgtcgcg

SEQ ID NO: 14043 - DNA, 316 bp, Zea mays
  Clone ID: LIB3159-011-Q1-K1-B7
cgacaatcaattatatcacccttccgtgacttcctttcaagaagttcaactctatggggcgcgttgaaatgatggacggcggcacaaaatatggccgaatcgtgatcgacctctatgcgatcgacctgaacaggacacttgttaacgcccctgctctgtccacttgccagattaacttcgaacggctctcacttactgacatctagattgacatcacactcgatcgcgtgatgtcaaccctgatcaacgctatggatgaagctgatctgaataccaattgcgaaaacagatcattctacaagaagctgattgtcca

SEQ ID NO: 14044 - DNA, 433 bp, Zea mays
  Clone ID: LIB3159-011-Q1-K1-B8
ctcgactcctcctaaccctagccgccaggctctagtgctccaccgctccagcagatcggggacccggaagcagcgaggaaacacagggcgaccaaggcccgtctggactctggatccgccggtccgtcactccgcccctcatctccgacctgagcgcgccgccctgccccgccccgcctctccctcgagcgctgtccgcgcctccgcgcctccgcggtccgcgtccggccgtccgcccagggcccaggcagttgctgcctgctggcttgctgccgtccgccaggccggctaggcacacagcacactacttctacagttctacggccagcgcccagcggtccagtccagctttcaaatggctagtgaggactcgaaagatatgctgaagaacgtggactggaagaaccggggcggtgctgtgactactgaatct

SEQ ID NO: 14045 - DNA, 443 bp, Zea mays
  Clone ID: LIB3159-011-Q1-K1-B9
ggaccgtgctgttcctgcgcggctactgcacgctgttgttctgggccatcgagctgagccggggggagctcttggacggccggaggaccgccaagagctccgtgtacacgcccaagtcgaccaccggcgcggaggcgtgggtgtggcacctggccaaggcctacgccaacgtgaacgactactgctggcaccagctcatcagccactggctcaacacccacgccgtgatggagccgttcgtgatcgccaccaaccggcagctcagcgtgacgcaccccgtgcacaagctcctcctgccgcactaccgtgacaccatgaacatcaactccaacgcgcgccagatgctcgtcaacgccggcggcatcttcgagaccaccgtcttcccgcgccagtacgcgttcgagatgtcctccgtcatctacaaggactggaacttcacagag

SEQ ID NO: 14046 - DNA, 314 bp, Zea mays
  Clone ID: LIB3159-011-Q1-K1-C1
cggacgcgtgggcatggctctccgcaccctggcatcgaagaaggtcctatccttcccgttgggcggcgcgggccggccgttggcggcggcggcgtctgcgaggggggtgacgacggtcacactccccgacctctcctacgacttcatcgcgctggaaccggccatctcgggggagatcatgcgcttgcaccaccaaaagcaccacgccacctacgtcgccaactacaacaaggcgctggagcagcttgacactgccgtctccaagggcgacgcctccgctgtcgtccagctgcagggcgccatcaagttcaacg

SEQ ID NO: 14047 - DNA, 289 bp, Zea mays
  Clone ID: LIB3159-011-Q1-K1-C10
cgtacgggctgatgaacgcaatggcggcttctgagactaatttaaacccaacacccaccgagatgacggatacttttaaagagaagtgggccaccacaacaaggacgacaatccacgctctcactgtgctggatactacgacagacagactgctgatgcacaaccgtgctactatgcgcacgctgcttgaaaggatctacactcagcatacggatatcaacgcgtatgatgttacgaagcgtgttactggccatgcgagagtttcgagaacacaatgctacacatgttc

SEQ ID NO: 14048 - DNA, 377 bp, Zea mays
  Clone ID: LIB3159-011-Q1-K1-C11
gaggaaggcacctgccagcgcatcagcagcagcgttaataagtggccgggatcgtcggaggacgcgaacgactatgccgcgggggtcaccatcttcgggtacgaggacgtgccgaggaacaacgagcaggcgctgctcaaagcgctggcgcaacagcccgtcagcgtcgccatcgaggcctacggcaggaacttccagttctacagcggcggcgtcttcgatgggccctgcggcacgcagctggaccacggggtagcggccgtcggctacgggacggcgggcaagggccatgactacatcatcgtcaagaactcgtgggggcccagctggggcgagaaggcgtacatccgcatgacgaggggcaccggcaagcgcca

SEQ ID NO: 14049 - DNA, 430 bp, Zea mays
  Clone ID: LIB3159-011-Q1-K1-C12
ggcgtacggtcgaagagtatcctgaaggagtttaaggacctgcttaaggacccgcccacctcctgcaggggaggtcctgttagtgaggacatgttccattggcaagcgaccatcatggggccttcggacagcccatttgcaggtggggtattcttggtgaacattcacttcccaccggattaccctttcaagccaccaaatgtgtctttccgcaccaaggttttccacccgaacatcaacagcaacggcagcatctgccttgacattcttaaggaacagtggagccctgctttaactatctcaaaggttctcctgtcaatctgctcactgctcactgacccaaaccctgatgatcctcttgtccctgagattgctcacatgtacaagaccgacagggccaagtatgaatccaccgcacgcctcctgacac

SEQ ID NO: 14050 - DNA, 93 bp, Zea mays
  Clone ID: LIB3159-011-Q1-K1-C2
gtggcgagtatcattgcctacgcccatccacctaataattactgcgctgtcctgtacgatcgagtactccagtccgtgcggaagtgcgctcaa

SEQ ID NO: 14051 - DNA, 470 bp, Zea mays
  unsure (1)..(470): unsure at all n locations; Clone ID: LIB3159-011-Q1-K1-C3
aggaagcaccggagcaggcgatacggcgccgacgacaatggcagcaacaagggcttcccgagtgcttctcttgctgctcaccgtccagctcagcttgctcttccgcctccccgactccccctccaccctcgccctcgccctcgccgcggaaccagagcaacagaacgccaagcagcatcgccagcccgcgctgctggtgcagtcgacgtgcaactccaccagcttctacgacctctgcatcgccgcgctcgccgccgaccccgccagctccaccgccgacgtcccgggcctcggcgccatcgccgtgtccgccgccgcaaacaacgcctccggcacggccgccttcctcggcaacgccagcgacgccgcggccaccccgcaggcgggaccgcgcgctctncgcgcctgcgccgggcagtacgccgncgcccgcgacgcgctcgtgcaggcgcgcgcgtccctcgccgagc

SEQ ID NO: 14052 - DNA, 379 bp, Zea mays
  Clone ID: LIB3159-011-Q1-K1-C4
cctctattcagtccctgctgtgtgacccaaacccatattctcctgctaactctgaagcagcgagaatgttcagcgagaacaagcgtgagtacaaccgcaaagttcgtgaggttgtggagcatagctggacagccgactgaaactttatccgctccgccaggcggtgtaaataaagcatctgtctttcctacttggccggtctgttttaccgttagaaatcctcagctatcgttgtgttcttgtggttcagtcccttgatgtagtgatgcctgcgggttttcctaatgtagtgctgaacggtttcataaactcggatattggtgcatatgtaacagatatagctaagtcaagttgttgcttggtttgcttaacacacaac

SEQ ID NO: 14053 - DNA, 311 bp, Zea mays
  Clone ID: LIB3159-011-Q1-K1-C5
cccacgcgtacgaagaaactcagacacagctacttcgccccaatcattaaacacaaccacaccctcaacgttgggtttcttctagctaccgcagccctaaatacaatcttacagctccctgactaacaaaccacactcgcactacccctagaaactgaaccagctcaacccaactccaaacagcatcatcagccctcactactagcgcagtcaacttgcaacttcaccaactaataccacctctgcatcgaacctctcgccgactaccacgccagatacaccgacgacctacatgacctcagtgccatcca

SEQ ID NO: 14054 - DNA, 426 bp, Zea mays
  Clone ID: LIB3159-011-Q1-K1-C7
ctgctcacccctctggcctcgctctgtgccgcccttccgcccgcccgtgtgccagtgggggtctggtacactccttcagtcgtcgcctagctagctactatatagtacacgacctgcctgcctagctcttgcactgtgagcagcggcgagcgatcgatcgatcgaggcagtcctagtaataagccaacaaacaaccggccggccggaacgccatgctggaggagtacaaaccgtgtgcggccatggtggcgacgcagtgcatctacgccgctctagcgctcttgtccaaggcggcgttcaccggcggcatgagcccactggtgttcgtcgtctacaggcaggccgtcgccaccattgtactcgtccccgtcgtcatcgcggccaacaggaagaagatgaatgagatgactacggcccttggactga

SEQ ID NO: 14055 - DNA, 416 bp, Zea mays
  unsure (1)..(416): unsure at all n locations; Clone ID: LIB3159-011-Q1-K1-C9
agccaggtatcgccatgtctgactcggaggattatttcttcgaatcgaaggccgacgcgcggtcgtttaanacctaccgcgggcaggctcgcaccgtccgtaagaacggcttcatcgtcatcaagaaccgcccctgcaaggttgtggaggtttctacctcaaagactggtaagcatggtcatgccaaatgccactttgttgccatagatatattcaacgggaaaaagctcgaagatattgttccttcgtcacacaactgttatattccgcatgtgaaccgtactgagtatcagctgattgatatatcacaggatggatttgtgagccttcttacttcaaatggcaacactaaggatgatcttagactcccaactgatgagactcttgtggcccagatcaaggaagggttttaaagt

SEQ ID NO: 14056 - DNA, 476 bp, Zea mays
  unsure (1)..(476): unsure at all n locations; Clone ID: LIB3159-011-Q1-K1-D1
gcggcggctgcggcggcacgtggggcgcggcagggcgcggggcatcgtctccgacgcgctgtacgtggtgagcatcggcaccaacgacttcctggagaactacttcctgctggtgacggggcggttcgcggagctcacggtgggcgagtacgaggacttcctggtggcgcaggcggagcggttcctgggcgagatccaccggctgggcgcgcgccgggtcaccttcgccgggctcagccccatgggctgcctgccgctggagcgcacgctcaacgcgctccgcggcggctgcgtcgacgagtacaaccaggtggcccgcgactacaacgccaagctgctcgccatgctccgccgcctccaggcggcgcgcccggngctcagggtagcttacgtcgacgtgtaccagaacatgctcgacctcatcaccaacccttccacgctggngctggagaacgtggaggagggctgctgcgcga

SEQ ID NO: 14057 - DNA, 295 bp, Zea mays
  Clone ID: LIB3159-011-Q1-K1-D11
attccttattgcggagctgttagcgctctgatgggggacagacattgggcgcgctcctgaccaaaaagcgaagacactagaccaataagacaggctggacactgacactacctgtgcaggagccaggggatcacttgagaggtcacaacctttcttagaaaggctgcgcttcgaaggagtccacagcgcacaactgagaagagtgaccacgttggcgggcgtgcaactgctagagatgacttattgcacgaaaagctcgcatgtgtaagttgacgctctatccaactagtttagc

SEQ ID NO: 14058 - DNA, 468 bp, Zea mays
  Clone ID: LIB3159-011-Q1-K1-D2
atggcatcttggaggatgttgtctacccagctgagattgtggggaagcgtgtcagataccgtctggatggttccaagattatgaagattttcttggacccaaaggagaggaacaacactgaatacaagctggagacctgcactgcggtctaccgcaggctgtgtgggaaagatgtggtctttgagtaccctatgaccgaaaatgcataaatatgatgccctctggatatctccactctatttcgttgattctgaatgttatgttgggtctccctatgtacttcaaaaacatagttttgatgctaaagttgcctagcaatttggtacggggaagtggcagtggacgtgaacaatgttaagttttgagcatttaaattaaacctttgccctgataacgttgctgagttatttaatttcttgctttgttcgcggcttgtcagtctgttaaactgtttattttatttggcat

SEQ ID NO: 14059 - DNA, 457 bp, Zea mays
  unsure (1)..(457): unsure at all n locations; Clone ID: LIB3159-011-Q1-K1-D3
gcagcagctagctagctagcatggccgggaaagagcttacgctgctggggttatgggcgagcccgttcgtgctccgggcgcgcatcgcgctcagcctcaaaggcctcacctacgcatactccgaggagaacctcgacgacaagagcgagcttctcctcagctccaaccccgtgctcaagaaggtgcccgtgctcatccaccacggcaagcccgtctgcgagtcccagatcatcgtgcagtacgtcgacgaggctttccccgccgccgcacctaatttccttccatccgacccctacgaccgcgccattgctcgcttctgggcctactacgtcgacgacaagttctacagcgcgtggatacccgtgttcaggggcaggacggcggaggagatggcggatgcggcgaggcangccgtcgcggcgctggagacgctggagcaggcgttcagggagtgctc

SEQ ID NO: 14060 - DNA, 450 bp, Zea mays
  Clone ID: LIB3159-011-Q1-K1-D4
gccgccgccgccgccgccccaatttgccttcggtctttcgtgctcaccttcaagagatcaagttgctgctgcggtagtccccaaccatcatcatgcaaaacgaggagggtaagacggtggacctctacgtccccagaaagtgctcggccacgaataggatcatcactgccaaggatcatgcctctgtccagatcaacattggccacttggatgcgaatggcctgtacgatggtcacttcaccacgtttgctctctctgggtttgtccgtgctcagggtgatgctgacagttcgttggacaggctgtggcagaagaagaaggctgagatcaagcagtaggtctttgcacgtagttccaccggtaatggactcttgagggatactgctctagctaatgctttagctgggggggggggagtgattctgatgttgggcctgtcgtttggtggat

SEQ ID NO: 14061 - DNA, 478 bp, Zea mays
  Clone ID: LIB3159-011-Q1-K1-D6
cctaggtttgctcgcgtacccttcccggtctatatgttgcctcggtctagaaatcggcgcggtcttctcgcttctcggctacatctaagcatgcctacacctgcggtttccagatagggtgtttggtacgatcgagcaacggtgaatctcgctctgatatttgtttgttcgaaacgcgtggttttgattttgagatgatgtgcaggttccgatctgattggttagattgatgagtggcgaatcggattgaagcgagacgaggctgcatggtttacgcgctccgaggcttctgatctgcgtgtttgctccgagactattggtgcctgactcggcaaattgcactctgccgaccttcagagccagttcgatctggcgagatctagacttcgaatggctattaaagcgtggctggatctctatctgcaccgcgcctctcgatgatgtctctgtgttgataatgattggatgaaatttcgat

SEQ ID NO: 14062 - DNA, 349 bp, Zea mays
  Clone ID: LIB3159-011-Q1-K1-D7
acccacgcgtccgggcaaggccacacgctgatgccttggacaggttttttccatgcacatgttctctgctggcggcaacctcctgggaggcgtagccttcatcggagagggcattcctgttgccactggtgcaacctttgctgctaagtcccgacctgacgtgctcaaggagtctggccctgctgggctagatgtcacattcgcgtcattaggcgatggtacctgtcataatggacagctctttgagtgtctgaacatagcacagctttggaagcttactattgtgtctgttgtgcgagaataaccagcgggcaattggaatgtcacacattatggctacatccgaccc

SEQ ID NO: 14063 - DNA, 483 bp, Zea mays
  unsure (1)..(483): unsure at all n locations; Clone ID: LIB3159-011-Q1-K1-D9
cgcagacgcgtggttaaattncaattacttcatagcttatttcatcgcagctcngctgatggcggtttatcttaatagggggacgcctgtgtctatcaaaatgtgtgtactatatactaataaataccaaaatctggactagaactgatgtggggaacaacgattatttatgagaaacacgtgcctgctctcatccatagaccattaacaacatcttggtggcgcagcccccagccctgagctctaagtttacctagttaaacaagtactccttggctcttaccaaccattatcattgataatcaagcattattgttcagcgtcacctgtttctgccccctggaagctattaacctaaccaaatgttgaactttcaatgaataacattacattagatcaggatgtctgactccggcaactttttcccactcatattgggagagcatgtcagtcatgtactttttctgaccgtgccaaaagatc

SEQ ID NO: 14064 - DNA, 272 bp, Zea mays
  Clone ID: LIB3159-011-Q1-K1-E2
ggcaaaatcaagagcacttacaaagaaatcaccggtagcagcaactgatcgaacatcattgacaagatgggttcttaagcatatggtagaattgcatccgtaagcactgaagctgccatgcaagtgaaagtgcttctggtcccgacctcagtcagagaaaaaaaaactctgcagttgagcaagccgttttactttgtttcagtgtaatatttatgacgtattcccagttctttttccggactactgtttactacgaaaatcccgatctgtgt

SEQ ID NO: 14065 - DNA, 464 bp, Zea mays
  unsure (1)..(464): unsure at all n locations; Clone ID: LIB3159-011-Q1-K1-E3
tgagaaagcagatacatctacttcggctggcttgttctatgtgtcgacagagacaacatgggcgttacttcggcatccggattggtgtatctcagcttactcttcggtggatgtgaaacgtagcgtggatgatggtgagaaacgtttcaatcagctttcaattgaggagaggggcaagtttgatgaagagacacttgtcaacgtgaacagcatcaagaggaataaaggaggcagccaaagatcaagtggttttagcaacgagtacattgtgataaccatattggttgctgctgagggagtacataagctgccggttataaatagcagcaatgacttaaagacagctctacaaaagatgggtgccataccatcaagcaaaatactggcagtcgaggtcctgtggactccgcanaatgagaatgacacattgtccgagcgagagctccttgaagattccccgctct

SEQ ID NO: 14066 - DNA, 452 bp, Zea mays
  Clone ID: LIB3159-011-Q1-K1-E4
caatgctgcagctgttgctaagaaagcccacaaatatatgaaccacgttgaaggaagctgcgtgggaccttggagtattaacggagcaagaattccatgagcttgtcgtcccggagaaaatgattggtccttctgattgataaccccatgttcactatgtttctttgaagcattcaggttgccacatccgcgagttctggtggccctgtgtttccaagttaatgattctagcgcacccataaataaagcaaataatttttcatatggtcattaggtcctcaccgtaccgcactagagaaatgatttttgcatggcggatggtatctgagaaaacagttgtattcttgttcaaatagggagcagtgcactttgattcatgaggcgccttccattatcttggcatcagtcaaccttttcttgccaagtagctagtgctatgtaacaagtgacat

SEQ ID NO: 14067 - DNA, 481 bp, Zea mays
  Clone ID: LIB3159-011-Q1-K1-E5
ccaaaggcaaagggcaaagcagaagttgcggttgttctcgtcctcctcttctccgtcgggggtcatatctctgcgtgcgtcgatggcgtcattctcggaggctccccccgggaacccgaaagccggcgagaagatctttaagaccaagtgcgcgcagtgccacacggtcgacaagggcgccggccacaagcaaggtccaaacttgaacggtctttttgggagacagtcgggtaccactgcaggctactcctactctgcgggaaacaaaaacaaggctgtagtctgggaagaagacactttgtatgagtacctgcttaaccctaaaaagtacattcctggaaccaagatggtcttccctgggctgaagaagccgcaggagcgtgctgatctcatcgcgtacctgaaggaagcaactgcatagttcattgacatgccttttgccattaagagaaaaattgtttgcagtttataaaaaacattt

SEQ ID NO: 14068 - DNA, 315 bp, Zea mays
  Clone ID: LIB3159-011-Q1-K1-E6
agcaagcaaaaattccccaatcctctcgtctttgtttcgaacatgtcggggcgcggcgggggcggcatgggcctgggcgagggcggcgcgaatcgtcaccggaaggtgctgcacgacaacatccaggggatcacgaagccggcgatccggaggctggcgcggcagggcggagtgaagcgcatctcggagctcatgtacaaggagacccgcgacgtgctcaagatcttcctgtagaacttcatgctagacgtcgtctcctacactgagcacgctcgccgtaagaccgtcacagccatgtacgtatgatacgcgctt

SEQ ID NO: 14069 - DNA, 405 bp, Zea mays
  unsure (1)..(405): unsure at all n locations; Clone ID: LIB3159-011-Q1-K1-F12
aaagcggaggggccacccacatcccctcttaantttactcttacatccacgatttaaattttcactacatcctanctagaccagaaactttcaattttaccatcacatatcaataaaccattccttccttcctcctgccgtacctccattatcgccatcgattcatactcttactatcacatactattagacccataattattcatcatgtcagtaattcagtatccaaacaattatattagattggcatactattataatactaccttatattacaatgtactcccttcaccatttcattcatttattgtccaaacaatttgatacatttcattatattaaaattttattatatatatcttgtgctcttagaacccaaacttagtattttatacaacattttca

SEQ ID NO: 14070 - DNA, 354 bp, Zea mays
  Clone ID: LIB3159-011-Q1-K1-F2
gctgatggagatagctcagtgtcgacatatgaaaggcgggcaagccttagggaattctacgcagttatctatccgattctgcagcagcttgagagtagtttgatcgagagggacctgaaagggaagggccgatgcaaggatatagtgagtaggaggaggatggaggattggaaaaaggtttccggtagggatgtggaaagggaggatgaatgcgggatttgcatggaggcatgcaccaagatggtcctgcctaattgcagtcatgcaatgtgcataaagtgctataaggactggtataagagatcagagtcttgccctttctgccgaggaaagcctaaaaagaatccgctcgac

SEQ ID NO: 14071 - DNA, 308 bp, Zea mays
  Clone ID: LIB3159-011-Q1-K1-F3
tgggaagctgttgggcggcgtgactatcgctcacggcggtgtgctccccaatatcaaccctgttctgctgcccaagaagacggcggagaaggcgtccagtgtggggagcaaggaggcaaagtcgcccaagaaggccgccaagtcccccaagaaggcatagactgactgtctggagtgatctgatgtttagcaggaccttgataccagtatgcggtgatgcgtaggctgtagatgggtcgaatgtgcttgtgtgtgtatgtgccctgctgcaagttgccctttgctatttaaaatggaagaagaaatgc

SEQ ID NO: 14072 - DNA, 319 bp, Zea mays
  unsure (1)..(319): unsure at all n locations; Clone ID: LIB3159-011-Q1-K1-F4
cgtacgngagaggctgatagccnaaatgtctattactcattgctttctgccccccaatatcaacccgctgctgtttatcaaaaggacggcggacaaaacattcaatgtatcgaccaaggcctcaaagtcccccaacaacgccgccatgtcccccaagaacgcataaactgactgtatgaagagatctgatgtttaccaggaccttgataccattatgcgctgatgcgtatgctgtacatggatcaaatgtgctcgggcgtatatctgccctgcttcaagatgcccttctctatttaaaatggaataagaaatgccttgt

SEQ ID NO: 14073 - DNA, 300 bp, Zea mays
  Clone ID: LIB3159-011-Q1-K1-F5
cgcagaggtcccgcggcttcctattcttcaccttttccaccgaggaggcgatgcccagggggatctatggcatgagcgggagggaactgcaccgacggaacatcaccgtgaaccaggcccagtcccgaagggggcgaagaggccgaagaaggggtaaactgactggctcgaggagagctgatgctacggcggaccttgacaccatgatgccgggatccgttacctgggtatcggtcgatactgctgctgcggctattaccgctgctgcagcttgccctacggtatttagaaccgaagaag

SEQ ID NO: 14074 - DNA, 477 bp, Zea mays
  Clone ID: LIB3159-011-Q1-K1-F6
cttcaccttgacttcatggtgaaggactccaaaacccttctctttggtgagaaggaggttgctgtgtttggctgcaggaaccctgaggagatcccgtggggttcggttggtgctgaatatgttgttgagtctactggtgttttcactgaccaggagaaggctgcagctcacttgaagggtggtgccaagaaggttgtcatctctgctcctagcaaggatgcccccatgtttgtcgttggtgtcaacgagaaggagtacaagtctgacattaacattgtctccaatgctagctgcacaaccaactgccttgctcctcttgctaaggtcatcaatgacaagttcggtatcgttgagggtctgatgaccactgtccatgccatcactgctacccagaagactgttgatgggccctcatctaaggactggaggggtggaagggctgctagtttcaacatcattcccagcagcactggagct

SEQ ID NO: 14075 - DNA, 494 bp, Zea mays
  unsure (1)..(494): unsure at all n locations; Clone ID: LIB3159-011-Q1-K1-F9
cgtncggcatagggcagcatttgttctcccgacctttgcatgtatagagctagaagcatattgcgttgccggtgaaacagagcaagcggaggaaacaccggcggcaccactgaagttgactcttgcatccaggagtgaaattttcgctacatcctagctagaccaggactcgcgatgtaccacaagatatcaagaaaccattccttccttcctggtgccgtacctccagtatcgccattggttcatagtcttactatcacatgctatgagacgcataatgaggcatcatgtcagtaattcagtatccaaacaatgagatgagattggcatgctaagaaaggacgagctgatattacaatgtactcccttcaccatgtcagtaatttattgtccaaacaattagatacattgcgttatatgaaggagtttcttaggtgtatctagtgctcggagaaccgaaacgtagtatctaggttgtacatgttcacccttgt

SEQ ID NO: 14076 - DNA, 382 bp, Zea mays
  Clone ID: LIB3159-011-Q1-K1-G1
gagcgatcccactcccgatcagcagctgatcgctcactcttgcagctcgatcattctttaggtgctctagctctagccctagctagtagctagccactcggtcgtgtagtcatcagccttctgatcgtcacccatggccactgccgaggtccagaccccgaccgtcgtggcgaccgaggaagcgccggcggtggagaccccggctccgcccgccgtcgtgcccgaggaggctgcccccgccgccgaggccaaggtggaggagccagctgccccggcggagaccgagccagctgccgccgctgagcccgaggcggcccccgtggaggcggaggaagagacgccaaaggaggcggagccggagccggcggcggctggagaggtg

SEQ ID NO: 14077 - DNA, 373 bp, Zea mays
  Clone ID: LIB3159-011-Q1-K1-G10
tctcctactccccaccctcgcggcgctcacggacacgccgcgccgcgcccacatgttgcttcagccgcagctccagctccagcacggctcccttgtctctcggtccctccggcctccgcggcgtcggcggctcgcggtctcggccgtgcaagatacgaatgatggtgaggccaagacggccgacgagataaccgataagtacgggctcgagttcggcctctggaaggtgttcagctccaaagaggaacagggaggcgaagggaaaaagtctcggacggaccatgccaaggaactcctggccaagtacggcggcgcgtacctggccacctccatctctctctccatcggctacttcactctatgctatccttct

SEQ ID NO: 14078 - DNA, 322 bp, Zea mays
  unsure (1)..(322): unsure at all n locations; Clone ID: LIB3159-011-Q1-K1-G11
ctttcttctccaccgcanaacctactcctagatcttcttaaaatcgccgggctgcccctcccctactnctccacctccctcttctaccacttccgctcctcatctcccccaacttaatctcgcccaactttcctttttttctctctacgctcctcactcaccttcccgtcgttgtactccctgcacaccacgactttctcccttactcccagcaacaacctcatttcttatatcccaagccccttactctccaatcttgaccgccccttcctttctccttctacttctttacatctcctttacaactccccttttttttttt

SEQ ID NO: 14079 - DNA, 464 bp, Zea mays
  unsure (1)..(464): unsure at all n locations; Clone ID: LIB3159-011-Q1-K1-G2
ccacaggcaggcaggaggatcggacgagtcagcgaggaagctgcctgctttcagatagagagagttattaagatggcgttgcttcggctgcttgccatctccctgctcttcgcagtggccactcctgtcagggacatcgcccacgatgcctgctcgtcagaagtgaaggatttccagcacctgaacaacagctcggggctccacctgacgctgcaccacccgcagagcccctgctccccggcgccgctgcccgccgacctccccttctccgcggtgctcgcccacgacggcgcgcgcatcgcgtcgctcgccgcgcgcctcgccaagacgccgtactctcggcccaccttgcttgacgagagccgcgcggngtcgtcgtcgtcgtccctcgatgacgagtccctcgcgtccgtgccgctcggcccgggcacgtacgtcggcgtcggcaactacgtcacccgcat

SEQ ID NO: 14080 - DNA, 446 bp, Zea mays
  Clone ID: LIB3159-011-Q1-K1-G3
ggcctacctgctctcgcggtgccgccccgactgcctggtcttcgccttcacgacgtctagggcggtcatgaggcggctgaacgtgcagtggagcctgatccccttccgcctcgccttctcggacgacatggagagcaacctgaaccgcaccttctccctgctcaaggccaggggcatgatccagtctggggacctcgtgatcgccctctcggacatgctgcagtacatccatgtgatgaacgtaccctgaggtagaagagccttacctttacctccatgccgcacggtcccgtatcggaaggaacacgcgtgttatcggcaccttggaaggacggattcttccttccctgcgcctaaatcgctgccctttgttttcgctgtatcagatgctgctatgctatgctaggctctagtctggcccagggaactgtggcaataatctgtgg

SEQ ID NO: 14081 - DNA, 424 bp, Zea mays
  unsure (1)..(424): unsure at all n locations; Clone ID: LIB3159-011-Q1-K1-G4
cgccgctcggcgggccacgcggacgctaagcgcgctccccggggtgacgccggaggggccgcggctcgcgccgtgtgccttacttgccggaatctccttcgtcgggttcgccgtcgtcgaccgcctcctccggcacgggtacacggtccgcttggcgctggaaacgcaggaggacttgaccaacttccggagaatgaaatatttcgccaggaccgccgggatgggggggtgtcnaccgtgatggcgaacgtgatggacccggacggcctgcgccgcgccttcgacgggtgcgccggcgtgttccacaccttcgccttcgtcgaccccgggggcatgtccggctacacgaagcacatggcagcgttagaagcccaagcagcggagcgggtgattgaggcctgcgtcaggacagagtccgtcagga

SEQ ID NO: 14082 - DNA, 437 bp, Zea mays
  unsure (1)..(437): unsure at all n locations; Clone ID: LIB3159-011-Q1-K1-G5
cgcgaacggtcccaaaacccacaccgccacacggtcacgcccaattctcccctctctcgctgcgcatcgacgacggcgagggcgccatgatcgtgcgcacgtacaggcgtagaccccgttccatctcggaaggcgggggcggggtctcgtcctcgcaggaggcgttcgacttcgatgccgacgtcgacgtgctgggatcgtcggcctcgcagccgctcccgccatcgcaggaatcctcctcgatgtgggacttcgacgaggacccgcctccgtccncgccgcggccccggaaggaggggaggcgaagcgggcggtgcggggccagaagaggaggagggttggagctcgcggaagctcccgtgatggcgccgacggtgacgctgatggaggcggaggaatacggagagatgatggagagcgtggacgacgtcacgttc

SEQ ID NO: 14083 - DNA, 320 bp, Zea mays
  Clone ID: LIB3159-011-Q1-K1-G6
gttcgactggtctataggatgtttcacccaactatatatgctgatggaagcatctgtgggggtatactacagaaccagaggggtcctatatatgacgctcctgcaatcttaacttctatccaatccctgctgcgtgatccagacccaaactcccctgcgaactcagaagcatcaagactgttcagcgagaacaagcatcagtacaaccgcaaactccgtgagatcgtggagcatacctggacagtcgactagtgcataaggatgctcctcctgcccgataggggcacaataagagagcgtggaaaacaacacacccactc

SEQ ID NO: 14084 - DNA, 410 bp, Zea mays
  Clone ID: LIB3159-011-Q1-K1-G7
gcggagccacaccacaccacccttggtccggcactagcactagctatccagtggagacgaggatggcgacggcgcgggggctgcaggttgccgccatggcggcggcgctgctggcggagtgggcgacggcggcggcgcctcggaagcccgtggacgtgccgttccagaagaactacgtgccgacgtgggcgcaggaccacatccactacatcgacggcgggcgggaggtgcagctgtacctggacaagtccaccggcacgggctttcagacgcggcgctcctacctcttcggccacttcagcatgcacatgaagctcgtcggcggcgactgcgtgggcaccgtcacggccttctacctgtcgtcgcagaactcggagcacgacgagatcgacttcgagttcctgggcaac

SEQ ID NO: 14085 - DNA, 454 bp, Zea mays
  unsure (1)..(454): unsure at all n locations; Clone ID: LIB3159-011-Q1-K1-H10
cctatctaacggcttcttagccacttttcttaccagccaaaaatacaaacccggtgggccttctactcacggatgatgccgaccaccttacaactacgcacaagagacntgcaaggcaacaataacccgtccaagcaagtgtcatactgacacatcaccgtgcatcagactatcttgttaacggggcgacaatcgccctcagactactgcactagaatgcattctgagcatccgcttaatctgactagagatcactgaaaagcaacattattttactatcggacaaaaccaatccatgatcttgcgcactgaaaccgtaatcctccttgcggtgagagcagcatcgcactcatttagcataatccggtactctaaatcgaccaatacaagantatttccaccagcaccaggcaacatgctgttggatcgtcagtttggtgtcttgttcctgatc

SEQ ID NO: 14086 - DNA, 373 bp, Zea mays
  unsure (1)..(373): unsure at all n locations; Clone ID: LIB3159-011-Q1-K1-H11
cccaccagggctgctttattaaaaaggcaggcccccacactcactgcncccaatcatttgatgctccactatcttttcgcatctcttgctcccaatccatcttttagacctcacaattctaatcagtgcctcccacttatcctcattatcattaacactcttaactatactcttacataccattaacccatttccatcctaatacaaccccatctacttcctcatatctattttaatacacacaaaacctaccctacttccttcatcaatatcatctccatgcccaataccaactacaactaccaacttctttattacactaaaatccgatttccccttcacccaatcatttatgaagatgctaatttcaaac

SEQ ID NO: 14087 - DNA, 492 bp, Zea mays
  Clone ID: LIB3159-011-Q1-K1-H12
gcgggcggcaacgatggttcaatgcaagttaattcataccttttcttgacaagcccgacactgaacaggcgggtgttaaccatgggcagggggcggcctatatcgtgaacttagacgctgcgcgctcattgctacttccaacgccaccgtgaccgatcaaatatttacccatacgcattaacagcagtcgagctgacatgtgcagtctcacaatccttgcatgaacttgcagtgaaggttgttgcagccaatatctacagaacagacaaatcgatatctgacacacatcttatatgcgctgccggaacatatcaagaagcatgtgcacagcttcaatatactgggtgttggaatgatacaactactatggccgcaggccatttgcatggatctgactacgcaagggtgctgcagaggtgggccgattatgttcttcgtggtgagcacaatatgtggagagctcttatcctatacgttgctgctggagcactg

SEQ ID NO: 14088 - DNA, 483 bp, Zea mays
  Clone ID: LIB3159-011-Q1-K1-H3
gtatcaataaccgaagccttgagacatttgttgttgatacttcgaacaccaagatgttgcgcgagaagcatggggatagcatcagggagaagggaattttggttgttggtgaatcaggtctgtttactccggatgatgttgcttatgttcagaatgctggcgtttctgctgttttggttggggaatccctggtgaagcaagagtgccctgggcgagccattgttgggttatttggcaaagaacttctgcactgaatgagaggacaaagattgtagtagtacatggtttggtggtgaggtgttagtgctaggctgctagctgttagccatagcatcatttgcagtaatagcattggttttattaataataccaccgaatgtgacatgcagaataaaaataatgttcaataagttccattcagtgattttctttagttcagtgacaaacgaatgcgatctgttcatgacagaggatctcccaagc

SEQ ID NO: 14089 - DNA, 315 bp, Zea mays
  Clone ID: LIB3159-011-Q1-K1-H4
cgggcgaccacgcgtccggcagggcgtgggaactggggcactgccactgattagcttattgcccacgatgcagaggggtcgccgaagatggaggaggcgtgggctgttgctgataaacaaggtgagcagatcgatgccccagcagcagatgagaacaaagataacaaggatgctactgcaaatgaggaggaagaaaaggaagaggacaaggagatgactctggaggaatttgagaaaataagagaggagaagaggaaagcactacttgcgttgaaggctgacgagaggaaagttgaagttgacaaggatctgcgt

SEQ ID NO: 14090 - DNA, 471 bp, Zea mays
  Clone ID: LIB3159-011-Q1-K1-H5
atgcgatccatggctctgcattctccacaatccatgtgacgcccgaggacggtttcagctgcgccagttacgaggttatgggcttggatgccactgctctgtcttatggtgaccttgtcaagagggtcctccggtgctttggcccctcagagttttccgttgccgtgaccatcttcggcgggcgtggccatgccgggacatggggaaaggcacttggtgcagaggtctatgactgcaacaacatggtggagcaggagctgcctggaggcgggctcctcgtgtaccagagcttctgtgctgctgaagacgctgttgctacctcgcccaaatctgttttccactgctttgacggcgagaacgtggagagtgctcctcctcctatgaagaaggactacaagctggctaatcttctctgctgggaggaggaagcggatgccatggaggagaaggcgggagtgcttgatgagtaag

SEQ ID NO: 14091 - DNA, 392 bp, Zea mays
  unsure (1)..(392): unsure at all n locations; Clone ID: LIB3159-011-Q1-K1-H6
attctccacaattcattttacgcccgacgacagtttcggctgcgccaattacgagggggggggcttgnataccactactctgtcttatggtgaccttgtcaagagggtcctacaatgctttggcccctcagagttttccgttgccgtgaccatcttcagcggacgtcaccatgccagcacatggtgaaatgcactaggtacagaggtctatgactgcaacaacattgtgtagcaagagctgcctgaaggcgtgctcctcgtctaccatagcttctgtgctgctgaagactctgttgctaccataaccaaatctgtttttcactgctttgacggcgacaacgttgagagtgctcctccttctatgaagaaggactacaagctggctaatcttc

SEQ ID NO: 14092 - DNA, 439 bp, Zea mays
  Clone ID: LIB3159-011-Q1-K1-H7
gcgtccggtatcagataaccgtagccttgagacatttgttgtttattctacgaacaccaacatgttgctgcgagaggcatgtacgatagcagtgggcggagaaagaacattttgtttgtctggtgaatcaggtctgtttactccggatgatgttgcttatgttcagaatgctggcgtttctgctgttttggttggggaatccctggtgaagcaagagtgccctgcgcgagccattgttgggttatttggcaaagaacttctgcactgaatgagaggacaaagattgtcgtagtacatggtttggtggcgaggtgttagtgctaggctgctagctgatagccataacatcatttgccgtaatagcattggttttattaataataccaccgaatgtgacatgcagaataaaaataatgttcaataagttccattcagtgat

SEQ ID NO: 14093 - DNA, 419 bp, Zea mays
  Clone ID: LIB3159-011-Q1-K1-H9
gcgtccgctatagcgaccggtccagcactttcacgctcagctctagttatggctgcctccaccatggcgagcggctccacggcgatggccggcacccccatcaaggtgggctccttcggcgagggccgcatcaccatgcgcaagaccgtgggcaagcccaaggtggcggcgtccggcagcccctggtacggccccgaccgcgtcaagtacctcggccccttctccggcgagcccccgagctacctcaccggcgagttccccggcgactacggctgggacaccgccgggctgtccgccgaccccgagaccttcgccaagaaccgcgagctggaggtgatccactcccgctgggccatgctcggcgcgctcggctgcgtcttccccgagctgctctcccgcaacggcgtcaagttcggcga

SEQ ID NO: 14094 - DNA, 402 bp, Zea mays
  Clone ID: LIB3159-012-Q1-K1-A1
cgtacgcaaacaccaagtctgggtttggtgtttatgctttactacctggccgaggcggtgatcgatggggatttggatggcgtgggcacactacacccgttggtcgcgtggacgatgcccatccactcgtgattaagcctcaacctttggtccttgctcacgtcgaaggtgtgaaaatgaaggtcaactcttgcaagctttttggaatccatctcgacaggccagccaaataagaacctttgaagtctacaccaaacgttgccacaccggcagatgagatttggatggcagacggaatcgacgcacacataagcggtgagatcgacaagactccaaagcaactcggtgctacacaagtggatcctgaaccagagagatgcgcatacgctttaaggggcacac

SEQ ID NO: 14095 - DNA, 411 bp, Zea mays
  unsure (1)..(411): unsure at all n locations; Clone ID: LIB3159-012-Q1-K1-A10
cgggncgaccgacgcgtacgccaagggaaacttatgagaccaccaaaatttatgaacaactactttggggttggctgtgatggaaaggttgccttagatatacacaacctgagggaagagaaccctgaacggttttatagccagtttatgaacaaggtgctgtatgcaagagagggagcaaagaacataatggataacacatttgattgttttccttgggatgtcaagcttgagatagatggatccaaaattgatattcctcatgactccgaaggtatccttgttgccaatatcaggagttacatgggaggggttgacctttggaagaacgaggatgatgtctctgacacttacctccctcagttcatgcatgacaagaaagctgaagttgttagcttcacaggaatgctg

SEQ ID NO: 14096 - DNA, 383 bp, Zea mays
  Clone ID: LIB3159-012-Q1-K1-A11
gcctgctcttcctgtctgtgagagagaccgaataagaggagagagaggcgcagcgcagcgcggcgcaggcgcgcatctcccccctccccttgccggctggcccctgctgcagctctgctccggtcggctctgcccccccgctctgctgactgctctgccgctgctgctgtcgcaggcgcgccaccaacccgccgatgcgcgcgtagcggcgtaggtaccatcatcatccatccccgcgacgacccaccacccacccctgcagtctgcagcatccccttccccactcccggctggtctgctgcggccacccctgcgccgatccacctccgctgcttcctgcctcaatatattcgcccgcctcgtcgcgtccgaccccgccacag

SEQ ID NO: 14097 - DNA, 291 bp, Zea mays
  Clone ID: LIB3159-012-Q1-K1-A2
atgccagtacaacactacttcgcaggaagcttttacagtggcttaagatatcatgaagacgaggctagaaaaggggtacgtgctcagcaaggatgctttggctaaggctagagcctttgatgagtcctatggattaacagctgcagcagcagccagggctgcagagctgagcaagagaattggtttaactgatagggtcaatgctggtgttggtgcaatgcgatcagtcgatgagacatattgcgtaagagagacaaccaatacggttgctactgccactggaagaacggc

SEQ ID NO: 14098 - DNA, 442 bp, Zea mays
  Clone ID: LIB3159-012-Q1-K1-A4
gccggccgcagccatggccgcccccgcaacgtcctctctactgagcaccctgctgaatctggcgctcgccccggtgtcggggaagagctcgccgccgtccgtggtgcatgtggcgcggcgggggccgatggtggtggtggccgccaaggggtacaatgtgcagatcctggtggacgagaacgagggggaggagtccatcttccggcggttccggcgggaggtgatgcgggccggcgtgctgcaggagatcaagcgccgtcggaggtatgagagcaagacggacgagaagaagcgcaaggcgcgcgaggccgggcgccgcaaccgccgcaggcgtatgatggatgagccgaggttcccagaagaagacgccgacgctaccgcaaaggctcgggacgaggacgatgacaactgggagatcgatggcattctgtgaaagagaagc

SEQ ID NO: 14099 - DNA, 453 bp, Zea mays
  unsure (1)..(453): unsure at all n locations; Clone ID: LIB3159-012-Q1-K1-A6
ccgggccggccggggcgtacggccaggcatatcggatcgtttctctccaccttctgctgctctgatggcgcggcccccttctggagctcgcttaaaaaaacatccccctctcgctgtgtgtcggagtaccgctttagttttgccgatccgggcaccagtgcccgctgcctctttcctctcatgcgtaagaggatcccgtccgccgntttcagatttcgttcggttcgtagaagaactctcacgttaagttaagttatcatggtgtgtgcttggtcgtcgtacgtcgtcgtcgtcgttaaggttttaagagatgatttggtcctgtgttgccgaggggaaagccaatctgcttttattttctttttttgtggtttgatccatcacacttgaggaaggagatgagatgattattctcccagattataatcctgcctgcttgtgcttgatttggat

SEQ ID NO: 14100 - DNA, 442 bp, Zea mays
  Clone ID: LIB3159-012-Q1-K1-A7
accacctccggtgtaacgactccggacgcgttaacaacgtgttcatcgacggcgcggacggggtgcgcgggcaaatcccgtcggcggtgggcgggctgacggagctcatgtcgctgaccctgttccggctggcggggctgacgggccccatcccggcctgcctggccgcgctgtccaacctgcagttcctgaccgtctcccacaccaacgtgtccggcgccatcccggagtccctggcgcggctgcgcggcctcgactcggtggacctctccagcaaccagctgacgggcggcatcccggcgtcgttcgccgacctgcccagcctccggtcgctggacctcgggcacaaccagctgacgggcagcatcccggcggtgctggtgcaggggcagttccggtcgctggtcctgtcgtacaaccagctgacgggcccgatcccgcg

SEQ ID NO: 14101 - DNA, 453 bp, Zea mays
  Clone ID: LIB3159-012-Q1-K1-B1
ctcatgggaaggcagaaccgcacaccaacaatcgtcattgtctggtccatccttcttgcatgtatcttctccttgctgtgggtgaagatcgatcctttcatctccccgacacagaaagctgctgccttggggcaatgtggcgtcaactgctgatcgagacagtgactcttatttgaagaggctcaatcaagatctgccccctcgtgtaaatacctgtcacctgaggaggctagatgggaattccttttgttgtaggtgaggatggatttgcatctaagttatgcctctgttcattagcttcttccgtgccggtgctgcagcggactaagaatcacggagcctttctaccttgcatgtagcgctagccagcagcgtaagatgtgaattttgaaagtttgttatgcgtgcagtttattgttttagagtaaattatcatttgtttgtgggaactgt

SEQ ID NO: 14102 - DNA, 447 bp, Zea mays
  unsure (1)..(447): unsure at all n locations; Clone ID: LIB3159-012-Q1-K1-B10
tagggatggtacttgttgtatgtaactgtttatatctgcctgcgcaattgctcccagcaggggaggagtggctctttggtccttttcgcatggcttggcaagattacactagagacttatatctctcagatccatatttggcttaggtctagcatgccaaatggacagccaaaatggcttctttgtttcataccagaatatcctatgcttaacttcatgcttactacggcgatctatcttcttctatcataccgngtgtttgagatcacgaatgtcttgaagtcggcttttatccccagtagggataatagccgtctgtaccaaaatttcgttgctgggatcgccatctctgtgtgcctgtatctctgctcacttattcttctgaagattcctgttgtatagcttattgcatctgcagggatgaacatacaccaagcaatctcgata

SEQ ID NO: 14103 - DNA, 304 bp, Zea mays
  Clone ID: LIB3159-012-Q1-K1-B11
actaccatcaaaatctttcaattccaccacatactatattaccttttctacaactgctttcactctctttctaactattcttacattaacttttcttccactaaataccattattataaactactctacaaatatattcaacgatattcttatcttctttacatcttaaaacatcattattatctttataatcattaaactattctattacaccttatttactcatccaccaatattttctttcatctttcatcactattatattttcttcaccttcttataacatattaatctttcctttctc

SEQ ID NO: 14104 - DNA, 269 bp, Zea mays
  unsure (1)..(269): unsure at all n locations; Clone ID: LIB3159-012-Q1-K1-B12
tccttcgccacctagtttaatcccttgcccaaggccgccccnaagaggcccaagggcggcgcttaaaagcccaagggcgcttccaaaaccaaaactaatacccccgccaaggcgaagcccgccacaaaacccaatcccgccgcgaagccgaaagccgtattgaatccgaaaacacccgccaagcccaaagccaagccagcttgcaaggcgaagcccaagaccgccggcgctaagccgaagccacttgcttaaaaagccggccgcccccc

SEQ ID NO: 14105 - DNA, 413 bp, Zea mays
  unsure (1)..(413): unsure at all n locations; Clone ID: LIB3159-012-Q1-K1-B2
cacgggcctcccggcattggtggctggaggagagctggacatggggtcgtcggcgcaggtgcctgccccatgggacgacgcccagaggaaggccaacggccgcacgatcctgtgaggttttctccttttttttgggtgacctgaccttcttagaggagttcggtttgcccattctttttcagtcgcagctttgcttttggtggggctagaagctctgtgaggtgtagcagtgcagtgcaggcctgtacatagctcgacctcgacgctcctcccgatcctgcatctgtgttgtgtctgaaaaaacaccgagttgaggctgctattatagccacaattcgatcccggcaggatggatggaaatggaacctgactttgatttgatgccccgacgcttttgngataatcggatgtga

SEQ ID NO: 14106 - DNA, 316 bp, Zea mays
  unsure (1)..(316): unsure at all n locations; Clone ID: LIB3159-012-Q1-K1-B3
ccaaccagaatttcttgcacntactgacaatgtgtgagagagagaggattagggggggcatcggcagggctgctctcctactgaccctgctggccgagagcctggccgtggagatccaggccgaccccgggtacggatacaccccgactcacacgccggccaccccgaccccgaagccggagaagccacacaccaaggggcccaagcccgagaagccgccaaaggagcacaagctccccaaggagcactggcccaaacctgagaagccgcccaaggagcacaaaccgacgccgtccacgtacaccccgagccccaa

SEQ ID NO: 14107 - DNA, 244 bp, Zea mays
  Clone ID: LIB3159-012-Q1-K1-B4
gccgagatccccccttcgctttgcgagggggcttatgggaggttttagtgctagggtatacaggagtgctctgcgcatggtgaaggcggggcaacaactccatgttatcggcggcggctgcaagaatgcgcccgcgctggggctgcacaagcagaactcgtggtcgccggacatcgagcgcgacaaggcgtggtagcgccggcgcatggacatgcgccgcgggagcacggtgctgcaccctgcc

SEQ ID NO: 14108 - DNA, 438 bp, Zea mays
  Clone ID: LIB3159-012-Q1-K1-B6
gcgctcctctccgagttgttgtctccgtcgctgctggctgctgcgccactggcccagccccgagatctgctcaacaatggcgacgcggcgccacatcctcctcctcgccgctgccttcgtgtcccttctcgcgctcgaggctgtggagggcctcgaagaggggccccgcgggcgccggctgctggtcctgctggacgacctggccgtgcggtcgtcgcactcggccttcttcggctcgctccaggcgcgcgggttcgatctcgaattccgcctcgccgacgaccccaagctctcgctgcaccgctacggccagtacctctacgatggcctcgtgctgttcgccccctccaccccacgttttggtggatcagtggaccagaacgcagtccttgaatttattgatgctgggcttgatatgatcctggcggcagattcctc

SEQ ID NO: 14109 - DNA, 443 bp, Zea mays
  Clone ID: LIB3159-012-Q1-K1-C1
agtgctcctgctcctcctcctcctccttcccggccgccgcgcgagcttggtgggttagtgtctcttcttcgcggagacctgtgagaggagccatcatcatggccgccgttgagactgttgtcctcaaggttgctatgtcatgcgagggttgcgcgggggcggtcagaagagtgctctccaagatggaaggagttgaaaccttcgacatagacctcaaggagcagaaggtgacagtcaaaggcaatgtcaagcctgaggacgtcttccagacggtttccaagtcggggaagaggacctcctactgggagggcgaagccacggccccggacgctgcggcggcttctggagccgaagcagctcccggcaccgcggcagaagcgccttctgctgttgctcggcggcgccagagatcaccccagccaaagctgacgcctgatcgtcac

SEQ ID NO: 14110 - DNA, 516 bp, Zea mays
  unsure (1)..(516): unsure at all n locations; Clone ID: LIB3159-012-Q1-K1-C10
ccgggncgagcccacgccgtcacgcagtagacacataatcagaggtcatactacaaaacacttctgaaaagtacgagttactgaattctcgctgagcgcgcgaagtgagctacttctgtattctgctgaacgctanacactctaacaaggcgaattcaaccaaccttcaaggttacctagagggcatgcaaaagttccgctcgtaatctcgaaagtctcctggcgaagaaggttcataccgagcaattacaaanagtgcatctctcaagaagggagaactcaagcatcatggggtgacgtgaagggcaccacatatgctcataatctgccttttggtcgggataagactctcgtgtacactatgctgtagcccgccccactcatggaaggaaggataccggtctggaagtaagaagtcttttattggagcgcaaaggattcactatgtattataaaactagcttaaagtgcatgtgtgttaacccttttcttttacgttgctcgaattatactttt

SEQ ID NO: 14111 - DNA, 428 bp, Zea mays
  unsure (1)..(428): unsure at all n locations; Clone ID: LIB3159-012-Q1-K1-C12
gcaaacatttttttgacctttatgtataatcattttttgnccattaangacataagcatattagctaagtttataaagcaagaacaccttgcccttcaaatgaaatggagggatgaaatatctaacattggtgtgacatgatttgaaaggcttggttgatgctgctgacaattatcataaggttcttgctgaaaatcaaaagctatttaatgaggtacaggaactaaaaggcaatatcagaatctattgccgtgtcagaccatttctttctggtcaaaacagaaaaacaaccattatttattatattggtgaaaatggtgatatttttataacaaattccttctaactatggaaagatgcttgcagaatgttcaattttaacaaaatttttaatacacctccctttcaagttgaagcattcttttata

SEQ ID NO: 14112 - DNA, 402 bp, Zea mays
  Clone ID: LIB3159-012-Q1-K1-C2
cccgggccgactccactccaatccaatcctgtggcgggcgactgcctccttccctcgatctgttctccatctgggcctccctgggctaaaaataacgaggcagaggcatcttcgatttgacgtgcgcttcctcttcctcgctcgctctcggtcgcagtgatggctgatgtcgacgagtaccgttgcttcattgggaacctgtcctggtcaacgactgatgaaagcctcaaggatgcgttcagcaaattcggcaacctcactgaggcaaaggtggttcttgacaaattttcaggacgttctcgtggtttcggctttgtaacttttgatgagaagcaagccatggaggatgctattgagggaatgaatggactggacttggacgggaggaacatcactgttgat

SEQ ID NO: 14113 - DNA, 413 bp, Zea mays
  Clone ID: LIB3159-012-Q1-K1-C3
cgcagaggtcccgcggcttcggcttcgtcaccttctccacggaggaggcgatgcggaacgcgatcgagggcatgaacggcaaggagctggacggccgcaacatcaccgtcaacgaggcccagtcccgcggcggccgtggaggcggcggcggtgggtacggtggtggccgtggaggcggcggctacggcggtggcgggcgccgtgatggcggtggcggctacggcggtggcggcggctacggtggcggcggcggctacggtggtggtggcggcggctacggcggtggcaaccgtggcggcggctacggcaactccgacgggaactggaggaactgagcggtggggcccgcgcggccaagttatcctgttcgctaccgtgatgtttaccctagtccagaggggttatcttcgttc

SEQ ID NO: 14114 - DNA, 425 bp, Zea mays
  unsure (1)..(425): unsure at all n locations; Clone ID: LIB3159-012-Q1-K1-C4
gcaacttggctacatagcgcttcttaggcaaagaaatgattcaggtgtccgtgggttgcaatttataatccagtcaacggtgaaggatcctgctaatctggatgccagagttgaaaattttctcaacatgtttgaaagcaatgtctacaatatgtctgatgcagagttcaagagtaatgtaagtgctcttattgatatgaaactggagaaatacaaaaacatacgcgaagaatcagctttcttctatggagagatttctgaaggaaccctcaaatttgatagaaaagaagcagaggttgctgcactgagggagctcaagaaggaagagttggtaggcttcttcaatgatcatgtcaaggtcaatgcaccacanaagaagattcttagtatacaagtgtacggtggtctccattcttgcgagtacg

SEQ ID NO: 14115 - DNA, 389 bp, Zea mays
  Clone ID: LIB3159-012-Q1-K1-C6
gagcgatcccactcccgatcagcagctgatcgctcactcttgcagctcgatgcattctttaggtgctctagctctagccctagctagtagctagccactcggtcgtgtagtcatcagccttctgatcgtcacccatggccactgccgaggtacgtgtccagaccccgaccgtcgtggcgaccgaggaagcgccggcggtggagaccccggctccgcccgccgtcgtgcccgaggaggctgcccccgccgccgaggccaaggtggaggagccagctgccccggcggagaccgagccagctgccgccgctgagcccgaggcggcccccgtggaggcggaggaagagacgccaaaggaggcggagccggagccggcggcggctggagaggtg

SEQ ID NO: 14116 - DNA, 466 bp, Zea mays
  Clone ID: LIB3159-012-Q1-K1-C8
cgggccgaccgcacgcgtccgggctgctcctcccccacctgttcgtgttcatgttctggttcgtgggcgagagggaagagagggcggcgtcggacgttgagtaccgttgcttcgttggcggcctcgcctgggccaccgacgaccactccctcaacaacgccttcagcacctacggcgaggtcctcgagtcgaagatcatcctgtatcgggagacgcagaggtcccgcggcttcggcttcgtcaccttctccacggaggacgcgatgcgcagcgccatcgagggcatgaacggcaaggagctcgacggccgcaacatcaccgttaacgaggcccagtcccgcggcggccgtggaggcggcggtggcggatactgtggcgggcgccgtgatggaggcggctacggcggtggcggtggaggctactgcggtggtcgtggaggctactgcggcggtgggggatacggtgg

SEQ ID NO: 14117 - DNA, 443 bp, Zea mays
  unsure (1)..(443): unsure at all n locations; Clone ID: LIB3159-012-Q1-K1-C9
gggcacacacnctggcaatgtggatcggcaggatctacatgttccacactggaacccaaactggtcccacgggacccccaatgcgcggatgcttccttgaaagcgctgtggcaacactcggactcgatcatgtgctgttccctgaaggctgctcccgtgttcacctttgccaaccaagccggcctggacatgctggagacgacgctgattgcgctccaggacatctcccttgagaagatccttgatgacgatggcaggaaggcgctctgcaccgagtaccctaagattatgcaacagggcttcgcgtacctccccggtggcgtgtgtgtgtcgagcatggngcggccggtgtcgtacgagcaggcggtggcgtggaaggtcctgagcgacgacgacaccccgcactgncttgccttcatgttcgtgaactggtccttcgtgtg

SEQ ID NO: 14118 - DNA, 447 bp, Zea mays
  Clone ID: LIB3159-012-Q1-K1-D1
cgcctacgccagtcaagaagttaacgggcctgacgggaagcccattggtcctcctatgggaaatccatggatctacatgtaccctgagggcttgaaggatctccttatgatcatgaagaacaaatacggaaacccacctatctacatcacggagaacggaatcggggatgttgataccaaggagacacctctacccatggaggatgccttaaatgactacaaaaggctagattacatccagcgccacatcgctactcttaaggaatcaatagacttgggatcaaatgtgcaaggctacttcgcttggtctctgctggacaactttgaatggttcgccggcttcaccgaacgttatggcattgtctacgtcgaccgcaacaataactgcacgcgctacatgaaggagtctgccaagtggttgaaacagttcaacgccgcgaagaagcc

SEQ ID NO: 14119 - DNA, 469 bp, Zea mays
  Clone ID: LIB3159-012-Q1-K1-D10
gcgtccgcacaaatgaagaaaccatctagtagctctggtttggaatcaatagatgatgatgttgatgcggacttttcgcaacgcaagtctgggcaaagtagttcaaggcagcatgcttctaggccagaagcctcgcctttggactttgtcattcgtccacagtccaaaattgaccctgagcagatacgagctcgtgctaagcaggctgtccaagaccagcgtcggctgaagatgaacaagaaattgcagcagctgaaagcgcccaagaagaaaaaccttcatgcgtcaaagctcagcgtggaaggccgtggcatgatcaagtacctgtagatcacccactgtggcatccgcagtcagcagtgtcctgcacatgatacagcgcctgcagggattgctgaattggtatgaagcatcctaccaccattccatggcaaacagctcggcatcagtaattgcttggatcttttat

SEQ ID NO: 14120 - DNA, 424 bp, Zea mays
  unsure (1)..(424): unsure at all n locations; Clone ID: LIB3159-012-Q1-K1-D2
ctcatctgacgggggacagtaccgtaaagttattaacacaatcatacttcaccgtggcgcagcccttactagaataatgattgctgccttaacaggggcgctaccatctggtcgtctggaggaggtttcttatgttctgctgtcacttagcagagtctttggtgagaacatgctgaactgggcaagggaaagcattaatcttataccgccacaagccctaacagatgcagaacgtttgcgcttcttcaacaccatatctgatgctgcttctgggtccagtctccataccataacagatagatttggtgaaatctcagatgtctgtagacgaaacaaaacagtgcangacctagttcagagtgccttgcggcctcacgatttgaccttcacagtggttccacaacagatgtgacaactggatgtc

SEQ ID NO: 14121 - DNA, 398 bp, Zea mays
  Clone ID: LIB3159-012-Q1-K1-D4
ggttatggtgccacttacgtggtcgatcagaatgaaaattgcgctcggtgctgcgaaaggacttgcttttctgcatgaagctgagaagcccgtcatctatcgggacttcaagacatcaaatatattactagatgaggaatataatgcaaaactatctgactttgggcttgcaaaagatggaccagttggcgataagtcccatgtttcaactcgtattatgggtacctacggttatgctgcaccagagtacattatgacagggcatctaacggcgatgagtgatgtctacagctatggtgttgtactactggagctcctcacgggccggaagtcactggacaagtcccggccagtcagggagcagatgctggcagactgggcactcccattgttggcac

SEQ ID NO: 14122 - DNA, 451 bp, Zea mays
  Clone ID: LIB3159-012-Q1-K1-E1
ggtgctctgaacacacatcttgccttgaacacataccttgttggacattctgttactctagctgacattgtattgacatgcaacctctaccatggaattgcacggatcttgaccaaaagcttcacttctgatttccctcatgttgagaggtatttctggaccatggttaaccaacctaatttcaagaaggtcattggtgaggtcaagcaggcagagtctgtacctcctgttcttaaaaagggtgttcctcctaaggagtcaaaggcaaaggatgtgaagaaagaaactccaaaggaggcccccaagccaaaggtgcttcctcttctgctggtacctctcaaggcgaaacccctgattcaagttgaaccggaggaccgctggaaaaggatatttccaatgtccttcgtcttctgcataaacattgtgctgggaaatgtcagcttgcgctaca

SEQ ID NO: 14123 - DNA, 440 bp, Zea mays
  Clone ID: LIB3159-012-Q1-K1-E10
gtgagctcgacaatgctacataaaaatgtgacttaagtcttaacagaacatatggcaagttgttgacaggcaccataggttcgttttctggagtggacagatgatttggagggttttgttctaaaaggctatggtgagtcaattaactacaggatgggactgccattgctcaaggatgttgtccagtcaatggaagaagcaatcatagctagagaagaaaaccgtgctgatggtacgtttgaaaaggcaaggctccgatttgcacatgcagaaactgttgttccttttagctgccttcttggtctttttcttgaaggtccagaaattgagaagatacagagagaggaagcattggacctaccccctttgccgtcacagggaagaaactggaagggcagtgttgttgcgccttttgctggtaacaatatgctggttttata

SEQ ID NO: 14124 - DNA, 331 bp, Zea mays
  unsure (1)..(331): unsure at all n locations; Clone ID: LIB3159-012-Q1-K1-E12
actattagttttttttcccttatttcttgtcctcttaacacaacacaccanagaggtctttcgagagtgtcttaaaagacaccgccccataccttccacttttttctctcactctttcacactctgaataatccactcttttttactaaaaagtactaatgactatatatttttataacaatgttttcatccttattattactctctccatcttcatctttgctcacaacattatatctctctttttatcaataccctcaatgcatctcttctctctctttatcttcatcttatttatttccataacaaatctttattcataacattacta

SEQ ID NO: 14125 - DNA, 417 bp, Zea mays
  Clone ID: LIB3159-012-Q1-K1-E2
cggagacacgatggagtcgatccgctccatgcatatccgccaagtgctcatgcagatcatcagcctcggtatgattgttacctctgcattaatcatatggaagggtttgatagttttcacggggagcgagtcaccagttgtagtggtgctctcgggtagcatggagcctggatttaaaaggggtgatatcctgtttttgcatatgagcaaagatcctattcgcacaggagaaatagttgttttcaatgtcgatggtcgtgagattccaattgttcaccgagtgattaacgtccatgaacgtcaggacactgcagaagtggacatcctcaccaaaagtgacaataattttggggatgaccgactattatatgcacatggccagctttggctccagcaacaccacattatgggacgtgc

SEQ ID NO: 14126 - DNA, 431 bp, Zea mays
  unsure (1)..(431): unsure at all n locations; Clone ID: LIB3159-012-Q1-K1-E4
ctacccgggtcgcgtcncccttctcctaccgttttacgtcttccacctctcgccgctttctcgtccgccctggtgagcggaagcgcccaaacaatcgctgccttttcttggcgtgcgcagctcctggtcggcacggcagccccccgcgggatctcgcttgctggcctggccgcgcgacattgaggcggggcgcctggagctcggagccgccgtagctggtgttggtgcctcggagccgatcgggtgtctggttcctgatttgatctgcagctgcagctgctgcggcggcggccgacatggcggcttctggagggctcgagcagtggcagaaggacgggttcttccatgcggtcgatgaggtgcatgagtccgcggacttagaattaatgggctagcggagagaaagcaaaattattttgacaagttggaag

SEQ ID NO: 14127 - DNA, 442 bp, Zea mays
  Clone ID: LIB3159-012-Q1-K1-E5
ctcacactaaactagagagctactcaagaaaataaatgcctcttcttcttgctctcgtcggggtcgtctccgtcccaatggagttgagcgccgtcacctgtcgcactgccgctgctccagttgcagcctgggcgccatttgggcgtccaagggagcagacgacgaagcgaacaagcctcacagacaggcgaggcggccggccggcgagcagctcgcgttgagccctctcgcaccactacatacgctgttgcatgctttgctgcgagctgtgcgcgcggagcatggagatgcatggaggcggcagaggtggtgggtgtgagcgcgtacgtggggaattgaggcgtcatggtccgagatatatacatgtctctcttgctaggtaccttagattattcttagattattcttagttctgttgttagtacgtacttcgtccgacgat

SEQ ID NO: 14128 - DNA, 434 bp, Zea mays
  Clone ID: LIB3159-012-Q1-K1-E6
cccgcccaccgccgtcgttttccaaccgcatttaggaggaaggagcaggaggatgcctgcggggcacgggctgcggtcgcggaccctccacctgttcgcgcggcccttccgcaagaaggggtacatcccactcaccacgtacctgcgcacctacaagatcggcgactacgtcgacgtcaaggttaacggcgccgtgcacaagggcatgccgcacaagttctaccacggccgcaccggtagcgtctggaacgtcaccaagcgcgccatcggcgtcgagatcaacaagcaggttaatggccgcatcatcaggaagcggatccatgtccgcgtggagcatgtgcagccctcccgttgcacggaggagttccgcttgaggaaagccaagaatgaccagctcaaggcggatgccaaggcccgcggtgaggtgatcagca

SEQ ID NO: 14129 - DNA, 449 bp, Zea mays
  unsure (1)..(449): unsure at all n locations; Clone ID: LIB3159-012-Q1-K1-E8
ggccgggcggggcgtncggncggttcacttctncttttttggnncgggtttttnctcntggcgccggggcnncctttggggggcctttttgttggcttcggcctcgctcatgtcttccccntgcgcgtgctgcctccccgcccgtgcctctcgccggggttttcnncgctgagggtgtctgtggtctggggcctgctcagagaggttgctgggtttgctccttatgagaagcgtatcactgagcttctgaaggttggcaaggacaagcgtgccctgaagcttgctaagagaaagcttggaactcacaagagggcaaagaataatagagaggagatggctgtcgtcctcaggaagatgaggtctgttgtctcgcacactggccagaagaaatagagagcattttaagtcattgagcctggcagatattatgttccagtgtctgattttca

SEQ ID NO: 14130 - DNA, 143 bp, Zea mays
  Clone ID: LIB3159-012-Q1-K1-E9
aaccagcacaaacagcattgcttcgatctttgcatggacaagaggacttgcccacagggcaaagctcgacgacaacgctagactactcgacttcgctctcaaactcgaggctgcttgcgttgagaccgtggagtccgggaaga

SEQ ID NO: 14131 - DNA, 452 bp, Zea mays
  unsure (1)..(452): unsure at all n locations; Clone ID: LIB3159-012-Q1-K1-F11
gggncgaccggcgcgtccgagaatgtaatatattttgctagaaattacccttattcctttcacaggctactgcataaagcgtatggtaagagagctgaatgggagtatccttttgcagtangcggcgtaaacatatcctatatgttagttcaaatgctggatttacagncagcatttcatgtgcttgattctcaatggcttgcaaggcgagcgagntatatggaattcaatgaggttctgaagtctacacggggtcagttagagcaagagcttactatcggaggtatttctcgcattcaagacatgccatcattcanaatgctgagaaggtagcgctgtttgtacttcacaggaaaagagatacattttagattccaatatattgtttaaatttgttggccgttctttcactggattttgaagacgtgacattgtgtatgttattgagtata

SEQ ID NO: 14132 - DNA, 457 bp, Zea mays
  Clone ID: LIB3159-012-Q1-K1-F12
cgaccacgcgtccggtggcttctcctccccctccggttcgggttttggttcgttagggtctccggggttcgggtgcgtgggtgggcggatcgagatggcggcgtctgatgttgagtaccgctgcttcgtcggcggcctcgcctgggccacggacgaccactccctccacaacgccttcagcacctacggcgaggtcctcgagtccaagatcatcctcgatcgggagacgcagaggtcccgcggcttcggcttcgtcaccttctccacggaggaggcgatgcggaacgccatcgagggcatgaacggcaaggagctggacggccgcaacatcaccgtcaacgaggcccagtcccgcggcggccgtggaggcggcggcggtgggtacggtggtggccgtggaggcggcggctactgcggtggcgggcgccgtgatggcggtggcggctactgcggtggc

SEQ ID NO: 14133 - DNA, 340 bp, Zea mays
  Clone ID: LIB3159-012-Q1-K1-F2
gcccacgcgtccggggagacaccatggaatgtctccgctccatgtttatgctgctattgctgatgcccatcatcaggctaaatatgagaggctcctatgcattaataatatggaaagatttgctcataatcacggggagcaagtgaccacatgtactgcagctaatgagctaacaaggagcctggatttaaaatcgcgcgatatcctgcttttgcatatgagcagagaatctctgaggacaggagaaatacctgcctgcagtgtccatgggcgtgagactgcaactgttcacagagtgattaatgtccatgaacattacgacactgtcaacatggacata

SEQ ID NO: 14134 - DNA, 292 bp, Zea mays
  unsure (1)..(292): unsure at all n locations; Clone ID: LIB3159-012-Q1-K1-F3
gggaatgcactttgctgggacgtttttgaaggngtttgttcgcgggaagtcctgcgacnccttgggcaccaatatgccgttcgtggccaccaagtactacaagccatcgtagtagattatattgttgtacagagggacgccttgcgtttctctcttgttgcggcttgttcttggcagattggttaagcattgcaactgtaacttctgtgagattgttgtcttacggttcacatttcatgtatgcctgcctaataagccttcttttcctaaatacaaagcatgtgcctatgtg

SEQ ID NO: 14135 - DNA, 469 bp, Zea mays
  unsure (1)..(469): unsure at all n locations; Clone ID: LIB3159-012-Q1-K1-F4
ggcccccccgggttcgcccacgcgtccgtgattttgcaaataaatctttctgatagtataagttctggtgagcaaaaggatattgatagggtcatgtctacaaggttagctaatgagaatgactctagcaggcgtctgaaatctgaatttcttatccagtttgatggggtgtcctcaaacccagatgatctagtaattgttataggggctactaataaacctcaagaattggatgatgctgttcttcgaaggctggtaaaaagaatatatgtgccactacctgatccaaatgtacgaaggttacttctgaaaaatcagctcaaaggacaatcattcaaactgtcgaaccatgattttgaaagacttgctgtggagaccgaanggtattctggaagtgacctgagagccttgtgtgaagaagctgcaatgatgccaataagagagctcggtccacaaaatattcttacta

SEQ ID NO: 14136 - DNA, 439 bp, Zea mays
  Clone ID: LIB3159-012-Q1-K1-F5
ctctgctgccgcggaggatttcaaggacaattaaatcaagttccttattggtgacatcgaaggcagccagggtgccttccagtactttggcctgaaagaggaccagacaccccttatcctcatccaggatggtgactccaagaagttcttgaaggttcacgttgaggctgaccagatcgtcgcttggttgaaggagtactttgatggcaaattgacgccgttcaggaagtctgagcctattcctgaggtcaacaatgagcctgttaaggtggttgtcgctgacaacgtccacgacttcgtcttcaaatctggcaaaaatgtccttattgaattctatgccccctggtgcggacactgcaagaagctggcgcccatcttggacgaggcagccaccactcttcagagcgacgaggaagtcgtgattgctaagatggacgcg

SEQ ID NO: 14137 - DNA, 432 bp, Zea mays
  Clone ID: LIB3159-012-Q1-K1-F6
cgggccgaccgacgcgtccgctccgattttgcaggacctttagttattaatttgggcgaggagaggtgggggattccagcggggatccttctcgtgagcccagtccatctgaccgtccttggtatctggggggggttgttctgtactctctctttaatttgtgagtcgtgacaggttcttgaagtgcaattgttaagagttttagttgtagaggaagagaagggtttgctaatatggcgttggcagggacctccaaagtagtgctgggatgtatcgcctttgggattttctgggtgatggccgtcttccccaccgtcccgttcatgcctgttgggcggacggctgggtccctccttggtgctatgctaatggtcctgttccgcgtcatcttcccggaagacgcgtacgccgcgaatgaccttccgatcatcg

SEQ ID NO: 14138 - DNA, 429 bp, Zea mays
  unsure (1)..(429): unsure at all n locations; Clone ID: LIB3159-012-Q1-K1-F8
agtctcccaacctcggagaattgatgggaaggaaacaggtgatcaggttggttcatcatcgcataaatctcaagacgcacaagtaggttctctagtcaacctgctgagaaatgccagcccgctgcgaaatcctagcaattcatcacagatatcaagggccgagtccagcgaagtagcctcagcaagctcggtcacgtcccgcaggacatctgacgcccttgaggagctccagtccttcaaggagataagggagcgactgctgttccggagcagcgcaaaacatcaagagccaccaggaaaaccataaggccattctttgttttgtttctcttaacgtgatcgctgatagactcccaaccgggaaaccatatgcacagcgaactatagttgctngtgtcatgtatatacgagtgctaaaagtgatgcttt

SEQ ID NO: 14139 - DNA, 386 bp, Zea mays
  Clone ID: LIB3159-012-Q1-K1-G1
gtcaggatgtgcttattgagaattgctacatatcggttggcgatgatgcaatagctataaagagtggttgggatcagtatggtattgcatacggtcgtccatcttctgacattttaattcgcaatgtaaccgcccgttctcttgtgaggtgagaattgagatatgttggctacattgtgtgtctacaataatctacttttgtgcatagtcctttgaagtcaaacctcaagagtagtaaattacgactatggtgtgtattgctgaacattatcaatcaggcttacactatctaccctatctttgtgcagtgctggaatttcaataggcagtgagatgtctggcggagttgcaaatgttactgtggagaatgtgcgcatctgggaatc

SEQ ID NO: 14140 - DNA, 462 bp, Zea mays
  Clone ID: LIB3159-012-Q1-K1-G10
cctcgccatcacataaaaccagtgcaagcagtagcagcgcaatggcgagcagcaccatggggctctcctccacagccttcgccggcaaggcagtgaacgtgccgtcgtctctcttcggcgaggcccgcgtgacgatgcgcaagacggcggcgaaggcaaagccggcggcgagctccggcagcccgtggtacggccccgaccgcgtgctctacctgggcccgctgtccggcgcgcccccgagctacctgacgggcgagttcccgggcgactacggctgggacaccgcggggctgtcggcggacccggagacgttcgccaagaaccgggagctggaggtcatccactcccgctgggccatgctgggcgcgttgggctgcgtgttcccggagctgctcgcccgcaacggcgtcaagttcggcgaggccgtgtggttcaaggccgggtcgcagatcttcagcgagg

SEQ ID NO: 14141 - DNA, 434 bp, Zea mays
  unsure (1)..(434): unsure at all n locations; Clone ID: LIB3159-012-Q1-K1-G11
ccgggncgaccgacgcgtacgaacccgaggaaggcgaaaatgatctaccgcttttggtcgctgctctcgtccacagtcntcaggtggggcggcgtcgtcaccgccggcctcgccggtatcttcctcttgggcggcaaggagaaattcaatggttatctgtgccgcgaaggcgagaggcttatgcagcaggacagagccactatgggccgaagctaagcgttagcttctttggtatctcaagggagcaatagcccttggaaatttcacaagatttctgcgtccctaccagaacaagtccctatctaggatggaatccatccttctgcaggctttcactttcctgattataacagtaacaataaattgacaatggtttgtgttcttctgcaacctttttggctcccttggttcgcaagggtttcgtgcttttgttg

SEQ ID NO: 14142 - DNA, 463 bp, Zea mays
  Clone ID: LIB3159-012-Q1-K1-G12
gcgggaataaaattctctgcatcggtgatgtacttcgtcacccttgcagcaccacttcggtgaagtacacgtgggtgtcttcacacggcaaagccgctcgtccagacgtcctggctctttgcctcaaggaacgactggctcgattagccgtgtcatcaatggttcgattagctagcatcattagctattgatttcggacgtgtgtcattcatcgatatagtgctgcacggatgatggcatgcattagtgctgcagagaattttattccgatgtacagtacagaggagagagaattgggggaactgcgaggagcgatgaacagtgtatagagtgaaaaataaaagtgcttcgtactaataatcactagaaaattatgcacatcttccacgcactaccggcacgactattgagtattttgtaaaataagatgtcacaagatatttattttctgtatgattacatc

SEQ ID NO: 14143 - DNA, 387 bp, Zea mays
  Clone ID: LIB3159-012-Q1-K1-G2
tctgcatccacgccggcggccgcgcggtgatcgacgaggtgcatcgcgggctcggcctgtcgcgacgaggacgtggaggcgtcgcggatgacgctgcaccggttcgggaacacgtccagcagcctggtgctgtacgagctggcctacatcgaggccaaggcccggatgagggcgggcgatcgggtgtggatgatctccttcggcgccggattcgagtgcagctgtgtggcattggagtgcgtcaagccgccggccgacgccggcgggccctgggccgactgcatcgaccgctacccggtgcatctccccgaagtcgccaaggacaacatctgatcaaccccttcttctggatctggggcatgctgcatcatgctggacatgaacatg

SEQ ID NO: 14144 - DNA, 449 bp, Zea mays
  unsure (1)..(449): unsure at all n locations; Clone ID: LIB3159-012-Q1-K1-G3
gctcgagacgagagccatttctcccagcattttagcacatggtgtccaccaccctcctcggtggcttcctggtcgtggctgcgtccgcagcgccggcgcggtcttgctcacctcgcgacctgcaggcgctgttgagcgtgaagcaggcgctagggaacccggcaacgctgtcgacgtggaccccagcgtcgcccgactgctgctcgtgggaccacctccggtgtaacgacgccggacgcgtgaacaacgtgttcatcgacggcgcggacgacgtgcgcgggcaaatcccgtcngcggtgggcgggctgacggagctcatgtcgctgaccctgttccggctggcggtgctgacgggccccatcccggcctgcctggccgcgctgtccaacctgcagtttctgaccgtctcccacaccaacgtgtacggcgccatcccggagtccctggcg

SEQ ID NO: 14145 - DNA, 273 bp, Zea mays
  Clone ID: LIB3159-012-Q1-K1-G4
aatattttatggtaacttttactttcgtattccaattacaataaatggggtgaataaagagggtttaatcagagcctatgaatatttcaacaattgtttcaaggatccattagcttttacggtggtaatagttggaaaaatagacccagccatctcacttccactggttctgcaatacttgggtggaatacctagggtacaggatgctactcaaccacttagtcgtgatgatctaagaggattgccatttaagtttcctgcaaccatcattag

SEQ ID NO: 14146 - DNA, 455 bp, Zea mays
  unsure (1)..(455): unsure at all n locations; Clone ID: LIB3159-012-Q1-K1-G5
ccacgcgtacgngtncgcattctncttggatttccctcccaggtaaggttagggttttctgaggcgctcatacgtggggcagcaagaagatgggatgtctgatggcttgtacacttacaagcatcaccgcgagcgaggagctgatatccacaccatctttgtgaagaagagcaaattcaggattctgctgtcatttatcggcacaacgttccttcttgtgtctgtttgctgcgccctgttatcgaaggatggtttatgtctttgttccctttggagcatttcatttgccagtgtaattgcgaaatgcctgcgatgtgaccctgtgaagaaagagtcattggtgatcatgccgacttttggaattcaattagagcaacacttttggagtggaagagttcatcgcaaatttgtgcccattggcaagattctaagaccagtgctgaatgagcatgtga

SEQ ID NO: 14147 - DNA, 310 bp, Zea mays
  unsure (1)..(310): unsure at all n locations; Clone ID: LIB3159-012-Q1-K1-G6
cgggccggccggcgcgtccgcngcggtnggtccttccttttnncgtnggcttgtggtgccgncgngngcggggngtttctggccnnggtgcngctgnntggtgnngcttnngnnngggttgcgngtgctgctggnngtgcccggttccngtnnntnntngtnttttnggcgcngnttgcttcnccgtgttgntcccggtgntgctgtttctgcttggnnnttcttncccntgtgntgttctttcnnctctggnnntnngngcnccctcttccnngtcngnnngtgnnntnntccttccngtgtcggttct

SEQ ID NO: 14148 - DNA, 264 bp, Zea mays
  Clone ID: LIB3159-012-Q1-K1-H1
atcgtcctaacaacttctgctggaattatggaccatgaggaggcccgccgtaagaatgttggtggcaaggttctaggtttcttttattgaaaatgtgtttttttgagccacagatgcgtccaagaactcgtctgatgttttgaggtttgttaagactgggtgtccgagcctttgtggtttgttaagacagcgatgtgtcatgtatttcagaaattgggatttttatgagatgtacctgcgagagccctgtctgtttcgattttc

SEQ ID NO: 14149 - DNA, 393 bp, Zea mays
  Clone ID: LIB3159-012-Q1-K1-H2
gaacgatgagcagaaggttggagctgaaatagtaaggagggccctgagctacccacttaaattgattgctaaaaatgccggtgtcaatggcagcgtcgtcactgagaaggtcctttctaacgataacttcaagtatggttacaatgctgctactggacagtacgaggacttgatggctgctggtatcattgatcctactaaggtggtgagatgctgtttggagcatgccgcgtcggtggccaagaccttcctgacatctgatgttgtggtcgtcgatattaaggagccagagtctgcgccccttgctaacccgatggacaactctggctatggatactaatggagatgagatggccaagccgcatgggaagaaggtgatcacaattttttttt

SEQ ID NO: 14150 - DNA, 438 bp, Zea mays
  Clone ID: LIB3159-012-Q1-K1-H6
cttgtaaatagcttggactggtcgaaacttataccaaatctcccgtggcttgtagaatcgggaggatgtgttttgctggattcttgtattattcttcagttcctttatttccattatcggaaacgaagggagccttcggatgagcacgacaacgcagacaaagcctgactgatatagaaactactgtttcttcttcggctcaaagaactgaagctgaaatgggtaccgacaccgacctgcctcctacaacgggctctggatagcagcagcatcgttgttacctgaagatttggagcgtcgtttcactggttgctgcttggagggtacttctcaccgccgtcatgtcctgtggagagccttgtgaactattatttgtcttgtagtgtcaaaatggcttggttttttggatttatttatatcagatatttgatgttggct

SEQ ID NO: 14151 - DNA, 199 bp, Zea mays
  Clone ID: LIB3159-013-Q1-K1-A1
gaccacgcgtacgcgctgtcctcgcctgggttactggactccttttgcgcctcctcctacatccactgcaccgggtcctctagcaacagcaggccggcacggcattgcctccccttgctcatctctcgcgctcgccgccagtattccggcagacccacctccggaacaggcagaatgtagtgccgctatagataaaccg

SEQ ID NO: 14152 - DNA, 404 bp, Zea mays
  Clone ID: LIB3159-013-Q1-K1-A10
gcggaggatcctgaccggcgggggcggcctgtcggccctgagggcggcgcgcgccgtgaaggagacgacggggatcgtgggccttgaggtggtgcctaacgcgcgagaggttctggtagggctctacgagcgcacgctcaaagagatcaaggccgtccccgaagacgagggttaccgcaaggccgttgaatccttcaccggtcaccgccttcagatctgccaggaggaggaggactggaagcgcatcgaggaccgaatcggatgcgggcaggtcgaggagctcatcgaggaggccgaggacgagctcaagctcatcgctaaaatgattgaatgggatccatggggtgttcccgatgactacgaatgtgaggtgattgaagacgacaccccaattcctaagcatg

SEQ ID NO: 14153 - DNA, 453 bp, Zea mays
  Clone ID: LIB3159-013-Q1-K1-A11
gagctccggaagccacatgtggggattgttggggacgcgaagagagtaactgagctgatcggccgggagatcaaggacaatccattctgcctggcaaggtcgcacccatgggtcgaagcgatcactaagaaggccaatgacaatgttcttaagatggaggcgcagctagtgaaggatgttgtgccattcaatttcatgacaccattgcggatcatccgggatgcgatccttgccgaggggagtcctgctccaatagtggtctcagaaggggcaaataccatggatgttggcagggctgtgcttgtgcagaatgaaccaaggacaagactggatgcagggacatgggggacgatgggggttggattggggtactgtattgcggctgcagcagctgaacctgaacgactcgtggttgctgtggagggcgattctggatttggcttcagtgcaatg

SEQ ID NO: 14154 - DNA, 350 bp, Zea mays
  Clone ID: LIB3159-013-Q1-K1-A12
caacacgccagtggggctatgttgtgattactactccgaatggtgttttggatcatgaggaggcaatcatgcagaacgtgggtgggcaggtccttggttatttccattgactgacaaggagcgccgctctcctagtcctgaatgaggcaacgggttgtgcccatttggtattactacactgttgttattaccgaacccattctgtttgcatcttgggagctgttttgttgtcgttcatggccatgcaagaaatgaaataacatgccaaatttacggctgaggtttgacaacactaggaatattgttaaacaggaacactgagtttcttgtgaggatgtcatgatagcttt

SEQ ID NO: 14155 - DNA, 168 bp, Zea mays
  Clone ID: LIB3159-013-Q1-K1-A3
cgggcaccccgcggcaaggcccagaacccaagaggccaccaacaaaaaggcttccaacaccgcaagttacttggccagaaaaaccaacaaggccaaccccaaggccgccaaaacaacgaaggcaaccaaccaaaaggccgccaaaacaaccgaggccgccaaccaaaa

SEQ ID NO: 14156 - DNA, 303 bp, Zea mays
  Clone ID: LIB3159-013-Q1-K1-A4
ccgggccgaccgcgacgcgtccgggatctcaaaatgcagctttttggtttgccttcaagatatcgtgattcactccgagcaatcgctcctggcttgccgggtttggtctataactacacaacccaccagcttcatggggtatttgaggctgccagttttggtgggtccaatatcgatcctactgcatgggaggataagaagtgtaaaggtgaatctagattcccagcgcaggcgaggatctgcattaagaagctgtgcaagccgtttgaagaggattccttcaagccaattttgcaccattat

SEQ ID NO: 14157 - DNA, 455 bp, Zea mays
  Clone ID: LIB3159-013-Q1-K1-A5
gggccgaccgacgcgtgcgataacggaatgtaagaaggcctctgcgatttcacggatgagccgccgatcgactgccctcgagaactacggatgggagtggaccgacagccgcttcaacctgctatccacgcaccgggagtgactggtcggagacgagaggatcagatggtgcccagcatgacttcctcgttcattagagctgagaccgaactcactgcacattttggccacaccagtgaggacagtaggccacaagtgcctgcgtgaagaattggttgacctttaatgagccccagacatttacttcattttcctatggaaccggggtctttgccccacgacgatgctcaccgggactagactgtgccatcccaactgggaattcactcgtcgaaccttacattgctggccacaacattcttctagctcacgctgaggcttgtgatctttacaac

SEQ ID NO: 14158 - DNA, 120 bp, Zea mays
  unsure (1)..(120): unsure at all n locations; Clone ID: LIB3159-013-Q1-K1-A6
gcgatgagcacctgaagaagtacctgcttggtctcctgccaaacctcgctgtgtacaacaagcaggctattatggcgactggagcaaaagacntctcggaccgccatccccgcaagatct

SEQ ID NO: 14159 - DNA, 392 bp, Zea mays
  unsure (1)..(392): unsure at all n locations; Clone ID: LIB3159-013-Q1-K1-A7
gntgggttggcttctcctcccccttcggttctggttcggcttcgtgaggttctgcggcgtgcgggttcgtgggtgagcgggtggagatcgcnccntcggatgttgagtaccgctgcttcgtcggcggcctcgcctgggccacggacgaccactccctccacaacgccttcagcacctacggcgaggtcctcgagtccaagatcatcctcgatcgggagacgcagaggtcccgcggcttcagcttcgtcaccttctccacggaggaggcgatgcggaacgccatcgagggcatgaacggcaaggagctggacggccgcaacatcaccgtcaacgaagcccagtcccgcggcggccgtcgaggcggcagcggtcggtacagtagtggccgtgga

SEQ ID NO: 14160 - DNA, 228 bp, Zea mays
  Clone ID: LIB3159-013-Q1-K1-A8
aagttggacccaagaccattcatgttcctactggggagaagctttctgtttttgatgcggcgatgagatacaaatctgagggccatgctactataatcctcgctggcgctgagtatggaagcggcagttctcgtgattgggctgctaagggtccgatgctcctgggagttaaagctgtaattgccaagagctttgagcgtatccacagaagcaacttggtggggatgg

SEQ ID NO: 14161 - DNA, 455 bp, Zea mays
  Clone ID: LIB3159-013-Q1-K1-A9
ctccatcgcggagaccctgtccctgctagacctatgcgagaaggaaggcatctgagctgtgggctgcctcgtgaggttctagtaaatatcaatcatccttgtatgttctgtagatggtggttggcaatgttgtttatttttcaagcgcaagctgctgccggtctcgttttccctgtcctggatggaagcaaagggacctggtactttgaaggccccccctcaaacataagctgtgagcctgtcagtgcacgtgtccgccgttgtcgtcaagaaccaaaccaaatcatgaaatcttgcgccgacggagagttggagcgtgtatgttttgctatctctatctacatgtctcagtagagtggatataccctggggtccccaaaagatgggggcctgtatgtaacactacgtgtaatggttaaggtgaatgtgccgtgaggccccccaaaagttggagt

SEQ ID NO: 14162 - DNA, 251 bp, Zea mays
  Clone ID: LIB3159-013-Q1-K1-B1
cggacgcgtggggcgaactcgtccgtgggatactggacgtcggtgcgaaagcagggcatgagatgtgcggaggacatatcagaggaatgtttggcttcttcttcaccggcgggcccgtccacaatttcggggacgccaagaagagcgacaccgagaagttcgggaggttctaccgtggcatgctggaggagggcgtgtacttcgctccatcgcagttcgaggcggagttcacaatttggcccaaaaccttc

SEQ ID NO: 14163 - DNA, 466 bp, Zea mays
  unsure (1)..(466): unsure at all n locations; Clone ID: LIB3159-013-Q1-K1-B12
ccggcttgaanacgggccgccacgcgtacgcagacctgctagatttgctcggaaatctacgcatctgcctggtttcagccgtctgcggaccgggcttgtgattctgaatcgttccaagttaacgccactgaaaggcctgatggcgtctgttttgatttatatatggcacgtaaggtgtgagcttggagaagttccattggctcagcgaagctggcattcaggatatgactgtgtaggatgttatttatttatatatagaaaaccaactttatgtatgtatactgctgtaactgtgtagtgctgaacagaacatctgttggatttggaggtgagctagttgacttatttcctcccaaagagaacaattgtgagtgcatagcaacagcttaaggcttaagcttgtttaggaacaatggaattggagaagatcgagcgctggttcggaggaaatctcattctattcaat

SEQ ID NO: 14164 - DNA, 435 bp, Zea mays
  unsure (1)..(435): unsure at all n locations; Clone ID: LIB3159-013-Q1-K1-B2
cgggcccgaccgcgacgcgtccggtacagcttctcagtctccctcacccacctggctttgngaacgacacatgtaccgctccgccaatgggctcaacatccggcagcggcagcgtgtccaatcgtttgcaagggacgtggcttgcctctcgccgttatgatcttgatgtgcttcgccgcttccacgacggcgcagcagcaaccaccgccactgccgcagacgacgacaacaggcactgtaccgctaccgagcgtgccagcgtgcctgccagcgcaggccacgctgtcgccgtgcgtgagctacctcatcggcaactcgtcgtcgccgcccacggagtgctgcgcccagatacgggccatgttccagtcgcaggcgccgtgcttgtgcgccgctttggcgtcggcggtgcccgcccagcagctcgggtccgcgctc

SEQ ID NO: 14165 - DNA, 450 bp, Zea mays
  Clone ID: LIB3159-013-Q1-K1-B3
gaacggaatcggggatgttgataccaaggagacacctctacccatggaggatgccttaaatgactacggaaggctagattacatccagcgccacatcgctactcttaaggaatcaatagacttgggatcaaatgtgcaaggctacttcgcttggtctctgctggacaactttgaatggttcgccggcttcaccgaacgttatggcattgtctacgtcgaccgcaacaataactgcacgcgctacatgaaggagtctgccaagtggttgaaacagttcaacgccgcgaagaagcccagcaagaagattcttacgccagcttagaaatcgggggcctcatgatgtgggtgcagcccataaaaaactggtgtgtggtttccgtatttgttcttcatgatcataaggagatccttcaagccctcagggtacatgtagatccatggatttcccat

SEQ ID NO: 14166 - DNA, 369 bp, Zea mays
  unsure (1)..(369): unsure at all n locations; Clone ID: LIB3159-013-Q1-K1-B4
gggccgacccacgcgaccgcggacgcgtgttcaaagtatccatctttgtttcgttccttgcgtatcgtttggtggcggggctgcccattcctatgaatggacggnagggagtccacggtggcgtccgggcccaacttctcgtccttcttcgcgcagcaccggagcatcggggcgccgggtgtcccctgccactcgcaggggcttcacgccccgccgcccggtgggtaccggcagcatcttgatgctgtctctgcggggtatgcattccagaccccgcatgttgggggtcccagcattgggcagggatacgaggcctcaccttatgcggcacagcacatcgcccgtggctgctcttgctcctgtggttgt

SEQ ID NO: 14167 - DNA, 389 bp, Zea mays
  Clone ID: LIB3159-013-Q1-K1-B5
gtatttctgggaccggccaaatgattttgatcccgagaggttttccgttccgaagaaggagtagagcatagaaggctggtccggttttgaccctgaccggagtcctggcgcaatgtaccccaacgagatcatagcggacttcgctttcctccccttcggcggggggcctcgcaagtgcgtgggggaccagttcgcgctcctggagtcgacggtggctctggccctgctgctgcggaagttcgacgtggagctgagagggtcgcccgacgaagtggagatggtgacgggcgccacgatccacacgaagaacgggctgtggtgcaagctgatgagaaggacttgacggcccaacattagctttgcatgttgcactgaatgagaagtagctc

SEQ ID NO: 14168 - DNA, 258 bp, Zea mays
  unsure (1)..(258): unsure at all n locations; Clone ID: LIB3159-013-Q1-K1-B6
agccggtctccacccaagttctgatatgctttctgctctgattagggttttgtgtcttgcggcttgggttgtcaatacaagggttagattctttgagcgaactctggcgtaacatggatttttttacctgacatttcttccattttccttatgtgcaattttcgagtccatctcacgcacaaagtggacaggtttgggtttatatctttgtttttgtaaacattttttctgtatcttgtaaattacgccnaanaaaaa

SEQ ID NO: 14169 - DNA, 362 bp, Zea mays
  Clone ID: LIB3159-013-Q1-K1-B8
cggacgcgtgggtttgtttctcgcgccgccttcgccgtcgccgtgacggaaggaagaggaggagcagggagcacgacgcgatgggccactccaacgtgtggaactcgcaccctaagaactacggccctggctcccgcgtctgccgggtctgcgcgaaccctcacggtctgatcaggaagtacgggctcatgtgctgcaggcagtgcttccgcagcaacgccaaggacattggtttcatcaagtaccgttgaagaggccactgtgctgctgtggagaacttcctacatcaaagaaatgggtccttcattagaaggcctaatttatgcgctttagctttttgttcagaacttgagactcatgtg

SEQ ID NO: 14170 - DNA, 377 bp, Zea mays
  unsure (1)..(377): unsure at all n locations; Clone ID: LIB3159-013-Q1-K1-C1
caatttgcatttccgtttacatgcataatgcttgggttgtacgtaacaaaccatgtacctggcatagtgaaggggattgaccaatcacagtgcantatcacttgatgggacacacgatcatttggctcatgttggtgtatgtcggtatttgctgaaagttgcagcctcattagagttgaattgtactcattgtcattggttaccatgggcctattcatttaaaccctcagatagatgccgttttgagctacaatctgctactgctgctgtgaggattgaaatctggttaaaactattaaagctagcaaaagtgatgtatggcttttgacatgatatatcatgtaacctggtttttctaggatgccctcctgtgaatg

SEQ ID NO: 14171 - DNA, 375 bp, Zea mays
  unsure (1)..(375): unsure at all n locations; Clone ID: LIB3159-013-Q1-K1-C11
cttttataccatccacgtcnaggactcgatgtgcggccaatttgccaccggcatgggcaacntgttcaccatcggcaagggcaacaagccgtgggtgagcctgcccaagggcaagggtatcaagctcagcatcatctatgagcagaggaggcgcgactttgctgcccaagctgctgccaaggcataagttctctgaatgtgctgcttggagctttttggctatgccaagttaaatttttatctgcaaggatataaacctaccttcccaagactttatcatcatgttttgtggcttttggttcttgaacagcgtgcgcagctaacctgaaatgctttaattcgactttctatatattgttgaaccgtgttgccgac

SEQ ID NO: 14172 - DNA, 354 bp, Zea mays
  unsure (1)..(354): unsure at all n locations; Clone ID: LIB3159-013-Q1-K1-C3
tcgagggacgcgtccggcaaggtcgaagcgtcntctctctctgcacgtagcctagtgcccggcctcgtgagatccgagattcggaagcgaggatggcgacgaccgcgactaggcngtggtggaggcggcacgacggcggcgacgatgacccagacgacctcgtccccatggacacccaagagcaagaagagctggtccggtctctggaggctaagcaggcgcagcaaggccgccgttggaggcgcgtcttcgcggggttcctcctaggttacgtggccttccttgtctactccagtttccatcatgcttggtctccctgggagctgcggtaccatgcttacttcatggaagatt

SEQ ID NO: 14173 - DNA, 377 bp, Zea mays
  unsure (1)..(377): unsure at all n locations; Clone ID: LIB3159-013-Q1-K1-C4
ggccgaccgcacgcgtgcgggcgctgntcaccggcgggggatcttgcatttgctttgagatcgccacccagctggcgcgggactgctcgcatgtggccatcatggtccacctccgggaggtcctcaacaaggccgtcgccgcgctccggtcccagggcctccgggaggacgcggccagagtgcttgctgcaacagttgcacattttggcaagctcgacattcttgtcaacggtgcagctggcaacttccttgcttccccggaggatttgacgcccaatggattcataactgttcttgagatcgacactttgggtacttacacaatgtgctatgaagccctcaagtatctgaaaaagggtgggccaagaaaaagccca

SEQ ID NO: 14174 - DNA, 459 bp, Zea mays
  Clone ID: LIB3159-013-Q1-K1-C5
gggccgaccgacgcgagcgtccgcttccaatatgtctaagcgtggacgtttaggttctgctggtaacaagttggggatgtgactgggtctaccaggggcaggcactgtgaactgtgctgataacactggagccaagaacctttacatcatttctgtgaagggaatcaaggggcgccttaacaggctttcttctgcctgtgttggtgacatggttatggcaactgtgaagaagggaaagcctgaccttaggaagaaggtgatgccagctgtcattgtgaggcagcgcaagccatggcgccgaaaggatggtgtctacatgtactttgaagacaatgctggagtgattgtgaacccaaagggagagatgaaaggctctgccatcactggacccatcggataggagtgtgctgatctgtgggctaagattgccagcgccgcatatgcgattggctagtggaa

SEQ ID NO: 14175 - DNA, 381 bp, Zea mays
  unsure (1)..(381): unsure at all n locations; Clone ID: LIB3159-013-Q1-K1-C6
gatgaagtgaggcgtcgactccgaaagctgttacctagtcaatcaccctgagttttttaaggctttgatttgaggttccattgagcacttcgaacgattcaacagagtttaatgtactttctatattgtatctactgcctcgttgggcaacgtgttgaagtgtgatttgagccggttgaaactggattatgtacactttctgtcctgagtttaactaaagtttagcccgtgtcacgtaaattgtttgaataannnaaaaaaaaaatgatcgtaacacttttttgaattttttttaagttttcattttctatttaatcattaattctataaaaatttcctttatatttttaatataggggggggccgttttaaggatccaat

SEQ ID NO: 14176 - DNA, 455 bp, Zea mays
  Clone ID: LIB3159-013-Q1-K1-C9
gtcagtcctgtctggtgtgtgcaccgcgcgttcgcgcccccgcctggctgccggcgtctgggccagaacgcgtaggcgcagcaacaaactaggaagcaacacccagctgcctcggcgcaacccgtcctcttctactccagaggcacctcggcatccgccgaccggtttccgagaggtttgctggagtgcaccagcggtggggcagcaaatctgtaactgacacacgatgaatcaggaggcgaaggactcgaggccctcaaggtctcccagcgagccaaacctcttcctgcaatggggcagccggaagaggctgcgatgcgtcaaggcgcgtgacgatggctctccatcgccgtcgccgtctgaaggtcttagacgcgccataccccgtgctactaggcccctccttggagctgacattgcggcattccggcgccctagcacctttaaccgcagga

SEQ ID NO: 14177 - DNA, 379 bp, Zea mays
  Clone ID: LIB3159-013-Q1-K1-D1
cgcgtgcgcgccgcgacaacttcgtcttccgccagtccgtcgccttaaacaactgggccaacgatctctggaccggggcctcctaacaggttggcatggatctcttcaatgatatggactctgcatctttcttccaaaggtacggatggtactatgtcatgcatgatatccttcatgatttttcacagtcactctctatagaagactgctttagattagaagatgataatgtgacagagataccatgcactgttcgacatctatctgttcccgttgaaagtatgcccaagcataaggcaattaatttccaacctcattatttacgcactgttatctacactcgattcactaatggatcatgccagtattatttttgatc

SEQ ID NO: 14178 - DNA, 447 bp, Zea mays
  Clone ID: LIB3159-013-Q1-K1-D10
gaggaaaccaacaggaagattccagctctcatattgatttgctctgtaagtgaagtttgacggattcatcatatgtgccccctgagtggtagttcagttagcatcttagaaatgtatatgatcaacaaaaccaaaccaatccaaaccaaatcatcttcccaaagagttgaggaactgcaaatgatcaactctgagaccttaaaggccagaattatcaactctgagactttgaaggcaagaatggggcaactgttggttaccacggacatggatgttaaagtagaacccagttgactttgcaatgtacacatttcttgtatcggctcttcatttacgtctgtattatcgcttttatgattggatgatgatgttattcttgagagatgttcggtgtgtttgggggcgcttagcccccctttgatattcattcgtgttgggagttaggtc

SEQ ID NO: 14179 - DNA, 468 bp, Zea mays
  unsure (1)..(468): unsure at all n locations; Clone ID: LIB3159-013-Q1-K1-D11
ggccgaccgacgcgnncggctggaggaaggagttgaacctttctaaatatcatataatgtcctcatacatgcgttatgcgggatgggcagaactcaactggcttctcatcattttcatgagatgctagaaaggggattggtggcaaacaaatacacatatactttgttgatagatgggaactgtaaagtgggcaactgggaagatgcaatgagattctattttgaaatgcatcagaatggtattcatccagattatttaacacataaagccttgctcaagggatttgatggtcacgtgcaccatacaattgagtacttggataacgttattttgggtgaatagattgattgacctctgaaagcttgtccttttgtcctcgcttcgctgatatctccctgtcagaggtgatagatggagttcctgggcccttcatttaaactggaaacaaaaagagagtttgaataaca

SEQ ID NO: 14180 - DNA, 271 bp, Zea mays
  Clone ID: LIB3159-013-Q1-K1-D2
cgcgtgcgaaccaagcataccccatcagattaagcttagtcgtcgccggagcatgaggaacgtcgagcatcaagatgtcgtggcgaggcgtacctcgatgaccacctgctgtgcgacatctaaggccagcacctcagcgccgccgccatcgtcggccacgacggcagcttctggtcacagtccgagaacttccccgagttaaagcctgaggaggttgctgggatgatacaggactttgattaacctggaactcttgcaccaactgttcttt

SEQ ID NO: 14181 - DNA, 449 bp, Zea mays
  Clone ID: LIB3159-013-Q1-K1-D5
cgccccgacaacttcgtcttcggccagtccgtcgccggaaacaactgggccaaggggcactgacaccgagggcgcctagctcatcgactccgtcctcgacgtcgtccgcaaggaggcagagaactgcgactgcctccagggttttcaagtttgccattccttgggaggaggcactggatctggcatgggcacccttctcatttccaagatcagggaggagtacccagacagaatgatgttgaccttctctgtattcccatcaccaaaggtctcagacactgttgtggagccttacaatgctacactttctgttcaccaactcgttgagaacgctgatcaatgtatggtgcttgacaacgaagctctgtatgacatatgctttcgcacgctaaagctcgccccccctacctttggcgacctgaaccatcttatctttgccaccatgagtg

SEQ ID NO: 14182 - DNA, 74 bp, Zea mays
  unsure (1)..(74): unsure at all n locations; Clone ID: LIB3159-013-Q1-K1-D8
cgggccgacggacgcgtacgcnccatcacataaaaccagtgcaagcagatttagcgcaanggcgagcatcacca

SEQ ID NO: 14183 - DNA, 471 bp, Zea mays
  unsure (1)..(471): unsure at all n locations; Clone ID: LIB3159-013-Q1-K1-D9
gggccgaccgacgcgtacgnacaaaccttttctgtttagttttcaagcttttggaaagagcatcacacgatgtgaaatcgttcatttcaacgggggacggaaagcacaaccatgaagttccagcagccagaaatagtgggcaaggcagttccagcgctccatctgcatcacaagctgttggttctcatcgtaggcaagaacctgcacaggccagctttgctcactttggtacggcctctttcagctcgttcggtctcccaccgagtggtcagttgggaccaacaactggcaatttcggcttccggatggttccgccaggcatgacgatcccagtgccctctctaggatcacttgcccctgtaaagatggttggaaattcatcaactatgcagggctacccaaggcttatggtgccgggagaaccaaaggcagagcctgtctcgcaaccacttatccaaatggcaaatgcat

SEQ ID NO: 14184 - DNA, 291 bp, Zea mays
  Clone ID: LIB3159-013-Q1-K1-E1
atcggcataaaaactgaatttaccatggcccacttgatctcttctgcaatcgcaggcgcgggcaactgggtcgctgatggaatcagtggtgtcactggcgtagcgtcgcaggttgtagaaggcgtagaggacactttaggcagtatcgtagaagcaatcgaccaaggagtcaaggatgaggaccaactggatttgcccaagtacgtgtgtttcaagggagataacggtctgtacctgagtgctcgaacggttgaaggccatccctacctgcagtttgcattggaagacatt

SEQ ID NO: 14185 - DNA, 451 bp, Zea mays
  unsure (1)..(451): unsure at all n locations; Clone ID: LIB3159-013-Q1-K1-E11
gggccgaccgacgcgtccgttctcttgttttatcagccaatgtttttggttctatggcngcatcttctctaagggacaaagagggaatgaaaagccttctgataacaagcttttctggaatgggtgcttcaatgctactcctagcattgtccttcacctggaaagctctggcaccttattctggtactcttgctgttgttggcactgttctgtacgtgctgtcatttgctctaggagcgggccctgttccaacgctacttttttcttaaatattttcctccaaaaataaggccaaagctgtcccattatctctaggcattcactgggtatctaactttttcattggcctgtacttcctgagtgtcgtgagcaagtttgggatcagcaacgtgtatctgggatttgcatcagtatgtgccctttcagttctgtacatagctgggaatgtggt

SEQ ID NO: 14186 - DNA, 475 bp, Zea mays
  Clone ID: LIB3159-013-Q1-K1-E12
ccgggccgaccgacgcgtccgcatgaatatgtcgaccgggtagcagagcatttattgaccactgccatcatgcgtcagattagtgccttcctggaagggtttaatgaactcattccacgggagctgatatctatcttcaacgacaaagagcttgagcttctgattagtggtcttccagatattgacttggacgatttgaaaacaaatacagaatattctggctacagcatagcctctccagtcgtccagtggttctgggaaatcgttcaggggttcagcaaggaagacaaagctcggttcctccagttcgtcactggcacttcaaaggtaccgttggaaggttttagtgaacttcaagggatctctgggccacaaaggtttcagatacacaaggcatacggcagcacgaaccatctgccttcagctcatacttgctttaaccaactagacttgcctgagtacacgtccaaagagc

SEQ ID NO: 14187 - DNA, 250 bp, Zea mays
  unsure (1)..(250): unsure at all n locations; Clone ID: LIB3159-013-Q1-K1-E2
cgggacgaccgcacgcgtgcgctttgttttgcctttntcttttcctaggatttcgtcttctatgccaatttgtttccaatagggagggctgtacccgccatgctgctgtactccaactgtggttacgttagtagttttcttgatctcacccccacgcggtacctgttttactactctctgtttggtggtttctgaagaagttgcccgtgtacttgtatcgtacaaaccgagtgggacatctgcatcgttt

SEQ ID NO: 14188 - DNA, 333 bp, Zea mays
  Clone ID: LIB3159-013-Q1-K1-E3
cgcgggcgccgccaccgtcacctacgcaacaccagacgcttcagctttccagcactcggagctcgcgcgcgcgacggcccaccatgatcatgcccaagaagaaccccaatgagatctttacgtacctttttcagggagggcgtgctgattcccaaaaaggactacaacctgccgaaccacccacagattgatgtccccaacctccaggggatcaacctaatgcaaagcttcaagtccaaggagtatgtcaaagagaccttctcctggcagtactactactggtacctcaccaacgatggcattgagcacctacgcaactacctgaacctcccg

SEQ ID NO: 14189 - DNA, 183 bp, Zea mays
  Clone ID: LIB3159-013-Q1-K1-E5
gtgcgtccgaggcatggggtagtatgggcttgtgttgtaccatcccctcctcgtctgccatgagtgagaagatgaagctgcttgcttggattggaacgaggggacggagatggagagagatagaaaagctttaatttgtgcatccaaccaagtggagtggagtggaatgatgtgtggtcgctt

SEQ ID NO: 14190 - DNA, 400 bp, Zea mays
  Clone ID: LIB3159-013-Q1-K1-E6
cctgactcggcttctctttttcggctgcgactgctggtcgagttgcggcgctctggtcagggttcattgtgcccttcgccacgacaattatcctccagtagtaagtcaccatgtcttcgtccatgcaatcttcataccttcctgctaccactgagtccgtagccaaggctcatgacgccaaggacgcttctgagtccatctcaatcctctaccacgtgcttgaggatccctcttcatctgcggatgcactgagagtaaaagagcttgccatcacgaatctcacaaactacctcacaaaagagaacagagctgaagacctcatgaaccttttgacccagctcatgcccttttttgcattgatccccaaggcgaagactgcgaagattgtgcgtggcatcat

SEQ ID NO: 14191 - DNA, 317 bp, Zea mays
  Clone ID: LIB3159-013-Q1-K1-E7
gcccaagctaatgcagcatggatttagtgatgccattgcaaaagtaggtttgacaaagtttgtcagtgacctattcttggttggactgttctaccatctgtataaccagattgctacaaacaccttggagcgagtggctcctctgacacatgctgtcggcaatgtgttgaaacgtgtttttgtcatcggtttctcaatcattgtttttggcaccaaaattagcacacaaactggaattggcacgtccattgccatagctggtgttgctatgtactcttacattaaggctaagattgaaggggaaaaagggaaagagc

SEQ ID NO: 14192 - DNA, 415 bp, Zea mays
  Clone ID: LIB3159-013-Q1-K1-F1
cgggccgaccgacgcgtccggtcgcaggtgtttaccacctaccatgaccattataccactgtctccatccaggtcgtttgagggtgagctcaatatgaccaaggactgccctcttctcggcaagttcgacctcaacggcattgcgccagctccaaggggcacaccccagatcgaggtgaccttcgaggtggacgccaacggtatcctaaacgtgaaggcggaggacaagggcacgggcaagtcggagaagatcacgatcacgaacgagaaggggcggctgagccaggaggagatcgaccgcatggtgcaggaagcggaggagttcgcggaggaggacaagatggtgaaggagctgatcgacgcccgcaaccagctggagacgtacgtgtacaacatgaagaacactgtgggcgac

SEQ ID NO: 14193 - DNA, 412 bp, Zea mays
  unsure (1)..(412): unsure at all n locations; Clone ID: LIB3159-013-Q1-K1-F10
ttttatggtgcttnttttncagattttattataccgctaaatactggggaatacgatatattcaaaatagatctgagcatnccaatantggaatagttcatgtcacggaatggttatagtggtacagaaaaatttcaagactatgaaggaatcgttgacatcgaaaagtcgacatctgtttccaacgcgtcaaatcttgcagttgcaaagctgatcgatggatatcttgcctatatcgccaaagatcccaacctttctcttccaaaattgatcgcactctccgaaatgttgtcttctctaccccggccaacgcatgactggctctatcgtgccattgacatgtatttgaaggagcaccccaacctaccaaagagcgagaagaataaactgtgcgggctgattgactgcaatc

SEQ ID NO: 14194 - DNA, 472 bp, Zea mays
  unsure (1)..(472): unsure at all n locations; Clone ID: LIB3159-013-Q1-K1-F11
ccggccgaccgcacgcgtcccaatctagtgcatatggcagctgttctatttatggtgactccacctggagggtgaactcagctgaggttgatatacctccttttggtcatgatcttggaaatgttgatccagatattaaatcagaaatatcagcaaactatatgggcaactataccgtttataataatcagatttgcacaggtatcacttcctttgtatagtattattatattcatacatgacttgggataggtgaaatacccactattatatcttgctttcaggngcatgactgttaattggtgatgccagattaatatacaggttagttgcttggttctagttaaggtaaccagaggtgtggtttacaacaccaaaaatgctagaggagcggatacaaacattttgtgaaactttcagattttagtttaatttctacatctattangcccttcgttttaaaatgagatgt

SEQ ID NO: 14195 - DNA, 542 bp, Zea mays
  unsure (1)..(542): unsure at all n locations; Clone ID: LIB3159-013-Q1-K1-F12
cgggcccgaccgcacgcgtccgcgatgagncgtgcgtgacatggtctgtcctgcggtttctccgggcccanngctgaaccctcggacgccctccgcagagcggtggctgtgtgaaccgtgatnncccgttcnnccgcggctttgcactttnncttcatggnntggggtgtcgcncnnccgctgaccgtnncccgcggcttcnngcagcagtacccgcgccgccttgacggttgccggagcctgacnngcagcagattgtgggaatgccaagaactnatgatgtgcgcggcggaccccgcgcccacgggcggtaccctgtacagcgtcccgccatggttccggggcatagaatgagcaccaaggagtgtggacgatgcagatgatcaacgtgcagaacaagatactcctcctacttcgtggagtggatccccaacaacgtcaagtccagcgtgtgcgacatcccgcccgtcgggctgcccatggcctccaccttcgtgggcaactccacctccatccaggagatgttccgccgcgtgagcgag

SEQ ID NO: 14196 - DNA, 454 bp, Zea mays
  Clone ID: LIB3159-013-Q1-K1-F3
cggacgcgtggggttcaacttgggcctttactgtttgttcgagactccacgcttcttttggcggttgatctgtcaaagcaacaccttctttggtatggttatgatcgcaagaacggaatgcactccctatgcccagctatctggtcaaagcatagaaaatggatgctgatgtcaatgatgtgcctcaaccctgtagcttgttccttcatggatgtgcaatttccaaatggacaaatgacatatgttgctggtgaggggataacagcaagtggttttattcctttatttggggggatactccaagcacatgcaaagtgtcccggtgatacaagagtgagcttctccttcaagaacaaacaaggtactaggttcagtccaacgtttcagtggcctgacaattctgtttcatttggagtcgcacaagctgtagcatggaagagatctggccttatgg

SEQ ID NO: 14197 - DNA, 297 bp, Zea mays
  unsure (1)..(297): unsure at all n locations; Clone ID: LIB3159-013-Q1-K1-F4
gcgggcggaaaatcttgtgaatgtccanattagctttttctttttcaaccttgatcagtttccacgggcagtatgctcttgaaaaggtccttgacatcaaccacctctttgatccggacgatgtcagtcataattcaaattgtatgacaactgaggacataacagctgcaacaaatgcgatgttctacaatacagaatactctgatgcttcttcaccctaccttagtcatttacacacagatcgattggcagctcaaaatcaatatttctatcccacttacagactaattcataacc

SEQ ID NO: 14198 - DNA, 474 bp, Zea mays
  unsure (1)..(474): unsure at all n locations; Clone ID: LIB3159-013-Q1-K1-F5
ctgaaaatngggcgacccacgcgtgcgcggacgcgtggggtttgtctgccaaaaaaaatgcatactattaatgaggtagtaagatttcgatgcaggttacacttaattagacccataatctttttatcatcaagacctgtgcacttttgggtttcatttttgactgttacaactcttgggtcttcaccaatgatctttagtgccaaagttatgtgcatctatgttctccaatccccaagatgcttttaagtttctctctttcaattgtcgcacaattacttcgttcttttgatgcaccagtttattgttgagaatgttgaaataatgcttttcgctcatatatttaggttcattgaatttggaaatgacggtggacctgcagcgaagaccttgaagccaaagttcaatttgttcgtcaagctagtgtccaagaatactggactggggctgccgcatatggatataaaaactgtc

SEQ ID NO: 14199 - DNA, 417 bp, Zea mays
  unsure (1)..(417): unsure at all n locations; Clone ID: LIB3159-013-Q1-K1-F7
gggccgaccgacgcgaacggtgcggcccaatgtagagttcaattttcctttttgaaggcatcctcannaanaggggcaccgttatctactgctacgactacccctgccnccacaccccctaatttgattatgatgaagaacagtagcctccaccagcaacaagcaaaagtccctatgcacgctctctacactcctggtcaccaatcacagacttccttaagttcatcaaaggtaggaccttctctaacaaacctttctaccggaggaggggatctatctctatcttcaaacgcccctgttgcttctggttcaccatccaattcggcgtgcaaaagtaccggtggcagcccacccgccacaggaaatgcaaagggtgttcatcagcctgtccaactgccattaccacatcaacgtcag

SEQ ID NO: 14200 - DNA, 272 bp, Zea mays
  Clone ID: LIB3159-013-Q1-K1-F8
ggcgggaaaatcttctggagggaccaaggttggacattctgtgtcaaggttgatcaattaccacaggccaggggcttattaaaaaggcctttaaatcaaccaattcttttatctggaagatgtaggtcaaaattcaaattgtatgacaactgaatacatgatggctgcaacaaatgggatggttgacaatttggaatactctgatgcttcttcggttctacctgggtcatttgacacaattggattggtagctgaaaatcaatattttgata

SEQ ID NO: 14201 - DNA, 395 bp, Zea mays
  unsure (1)..(395): unsure at all n locations; Clone ID: LIB3159-013-Q1-K1-G1
ggcgacccacgcgngcgcgcggacngtgtcatccagtcgtgcttcacccttggttccgtctccttcgagatcagcgctggatactggcgcgaccactggcggagagtggccgnggaggatgcgtcgcagcctcatggcatcagactcctcatcgaggactacccttacgcaaacgacgggctcctgctgtggtcggccattcgcagctgggtggagtcgtatgtgcagctctactacccggacgccggcaccgttcagtccgacgacgagctccaagggtggtaccacgaaacggtccacgtcgggcacgccgacatccggcacgcgccctggtggccctcgctcttcacgccgggggacctcgcgtccatcctgaccacgctcgtctggctcgc

SEQ ID NO: 14202 - DNA, 455 bp, Zea mays
  unsure (1)..(455): unsure at all n locations; Clone ID: LIB3159-013-Q1-K1-G10
ggccgccggcgcgtacagtacgcccaccancagcttccctcttgctgtttccgcccctccgcgcgaccgggctaccgtgtccgcctccatggggctgatcgcccacnacgacttccaacatattctgcgtctgctgaacaccaacgtggatgggaagcagaagatcatgttcgccatgacctccataaagggtgttgggcgccgcttctccaacatcatctgcaagaaggccgacatcgacatgaacaagatggccggtgagctgactcctgaagagctggaacgcctgatgacggtcgtggcgaaccctatgcatttcaaggtgccagactggttccttaacatgaataaggattacaaggaccgaaggttctcacatgtcgtctccaacgccctccacatgaagctcatagacgaccttttgaggctcaagaagatcaggaaccaccgtggtc

SEQ ID NO: 14203 - DNA, 363 bp, Zea mays
  unsure (1)..(363): unsure at all n locations; Clone ID: LIB3159-013-Q1-K1-G11
gaccgacgcgtacgcctcgcgcctctgccgcatttcttttacaggttagaagganagaaagagggcgagagggttgtgcactttaacatggtccccaacggncacttcaagaagcactggcagaactatgtcaagacatggnncaaccagcccgcccgcaagcagatgcgccgcatttttctgtcattttttttttttatatanncttttacctactttttttttttttgtcccattgngcaattttttactctcaaattttttttttaggcaagggctgggagaggctttaccctttttttatttaaagctgcgggcattccaaaaaggcttgctccaaccattgtcatttctgtggatcac

SEQ ID NO: 14204 - DNA, 454 bp, Zea mays
  Clone ID: LIB3159-013-Q1-K1-G12
caggagggtccgccgtgagtacaaggcaaaatagatctctgaggaggaatacgtcactgccgtcaaggaggaaatcaacaaggtcgttaagcttcaagaagagcttgacattgatgtgcttgtgcatggcgagcctgagagaaacgatatggttgagtacttcggtgagcagctctccggttttgcgttcactgccaatggctgggtgcagtcttatgggtcaaggtgcgtcaagcctccgatcatctacggtgacgtgagccgccccaaccccatgaccgttttctggtcgaagacggcacagagcatgacgtctcgcccaatgaaggggatgctgactggcccagtcacaatcctcaactggtccttcgtccggaatgaccagccgaggtttgagacttgctaccagatcgctcttgcgatcaagaaggaagtcgaggatcttgaggctggt

SEQ ID NO: 14205 - DNA, 245 bp, Zea mays
  unsure (1)..(245): unsure at all n locations; Clone ID: LIB3159-013-Q1-K1-G2
ttctgaagggaccagtttggcacattctgtgtcaggtttgatcaattaccacggggcagaggcttatgaagagggccttgaaatcaacgatttcttttatctggaggatgtaaggcagaatgcaaaatgnatgacaaccgagtacatgatgtctgcaacaaatgggatgtttgacaatttggaatactctgatgcttcttcggttctacctgggtcatttgacacaattggattggtagctgaaa

SEQ ID NO: 14206 - DNA, 317 bp, Zea mays
  unsure (1)..(317): unsure at all n locations; Clone ID: LIB3159-013-Q1-K1-G3
gcgaacggaaggtactgtccacttgaccacgttgcaatggatcaaaatgaggagctatttgcggntggcaacagtgcacggggagagggagtagcccccgcgnnngaattgttttacttacacccgcagaacccnaanncannggnacttngggaagcacaangaggcgattttgccaatggtgcacaagtgaagaacgaccaattttcgagcagcggcgaggcaaaatggttgcggcaaaccgggcttgnngnnctgttgcctcaaggaaaagaaggccaaggncctgagcatcctagtgcccgctnggagcgcta

SEQ ID NO: 14207 - DNA, 350 bp, Zea mays
  unsure (1)..(350): unsure at all n locations; Clone ID: LIB3159-013-Q1-K1-G5
ccgggcccgacccacgcgtgccgcatctactaccctaacgactgncgagctccattgtgacgtggagctgcaggcgtggtggaaggaggtgcgtgaggaggcgcacggcgacctcaaggaccgagactggtggcccatgatggacaccgtccagcagctggctagggcgtgcacgaccatcatctgggtggcatccgcgctgcacgcggctgtcaactttgggcagtacccatacgccgggtacctcccgaaccggccgacggccagccggcgcccgatgccggagccaggcagccacgactacaagaagctgggagcggggcaaaaggaggcggacatggtgttcattc

SEQ ID NO: 14208 - DNA, 115 bp, Zea mays
  Clone ID: LIB3159-013-Q1-K1-G6
gagatagcgcgggcggggaggggaatgagacatgtgatctcagagaagaactagccaccacgggcgagcatcgcaagccgagctgcaggacccgagcggaaccggagagggagac

SEQ ID NO: 14209 - DNA, 342 bp, Zea mays
  unsure (1)..(342): unsure at all n locations; Clone ID: LIB3159-013-Q1-K1-G7
ccgggccgaccgcacgcgtccggcagtgtatgggcacctctccgctatgacaaatctccgcctgggggtgtttcacatgcctgggcgncagattattggcaaatgcagncacaatctggagataatgtttcacatctaacagacggncatggagacagaaagacaaacccaaggggtcagggaggaacccggggggtcccggtggaaaaggaccataggcatgccacccgccggggaccccaatgtgacccaaaggaaccacaaaaatcggctagcgcgccggagggaaaaaataaagagaggggctctgctagctatggtgctcatgagagacaagaatgg

SEQ ID NO: 14210 - DNA, 415 bp, Zea mays
  Clone ID: LIB3159-013-Q1-K1-G8
ggtgaaactaatttggcggcattcagagcatgtttcaacgattcacattctgatcaggctgcaaggatatctttcaagaacggctgtgcacgaggtgtgaccgggacaccctacttctttgtgaatggcatacccatcaacgattcaggttctcctctggaatacaaggactggatttctatcctgcgtcccttggttggaaagatgtaacgcggttgctagtttgttcatcaataaagtcctagtggagagtaaacaaacaaaagctgaataataaataacattaatcagcatcgtcattctcaggaaaaaaaaagagtgctaactcagtaactctcctcggattcaaattgtgtacaagcaacagttcattctgtcaggcaacatatcatgcgtgtgcaactgtcccggattc

SEQ ID NO: 14211 - DNA, 329 bp, Zea mays
  unsure (1)..(329): unsure at all n locations; Clone ID: LIB3159-013-Q1-K1-G9
cgggccgacccacgcgnccgcnccaanggcgaccgccatnncctcncnagtttctccnccgaccctccaccggggctgccggagccctgcctacgggtccggggccgngtgcacccctatccgcatctccttccggcccgccgccgcgccacaagngncgcgccggggctcggcgctgcgggtgtccgcctcctcggcggngctcgaggctctatatgctttttctgctctgaagctctacgnggggaatatccccaggaccgttacaaactacgagctccgcgacatgttcgctgcgcacggcaaccgcnagcgggccgaggttatgt

SEQ ID NO: 14212 - DNA, 123 bp, Zea mays
  unsure (1)..(123): unsure at all n locations; Clone ID: LIB3159-013-Q1-K1-H1
gggggggacagccccaaagaacaancatattatttcagaaacaccctagacaaaacgctaaccatgagcattaacaaaatactgagaatgattagcaacactgctgggcgaccactaatagcc

SEQ ID NO: 14213 - DNA, 467 bp, Zea mays
  Clone ID: LIB3159-013-Q1-K1-H10
cgggccgaccgacgcgtccggctagtgctagtcccccttccttccatccattcatggcatgcgtcagcaccttgcagagcgggcccattgccagaagagcaaagatcaacaccaggtccaggggcagcagcagtagcgtggcgaaggggtcaccaccaccagccttccagttccagtgcagggcgtcgactttcgcggcggacaccagcctccggctcgagctggacgagaaccccgaggcgatcatctcgggggcgtggcccgggaactgctccctcctcagctacgacgacctccgcgcctacctcgagtcgcaggagacggcggcccaggcagacgatcagcgcggcgtggcgctcctgagcgagaccatgtccacacccgtgctggtggccacagcagaccagaccctggaggacgtcgagtgccacttcgaggccgtgtcggggcttccggtcgtcgacagc

SEQ ID NO: 14214 - DNA, 237 bp, Zea mays
  unsure (1)..(237): unsure at all n locations; Clone ID: LIB3159-013-Q1-K1-H11
gaccgacgcgtacggcgtgtaagttctctcgcatggttttcttctttgctttcttcnggaaccccgtgcgagatcgtgctccaccatgagatccgtgctcaaaaaaattatgttagcaagcttaccgggcataaatctgaagtttgtggactcaagtggtcttatgacaatcggcagcttgcattctgaggcaaagacaaaggacgctttggttgtttttcacattttttttcaacc

SEQ ID NO: 14215 - DNA, 543 bp, Zea mays
  unsure (1)..(543): unsure at all n locations; Clone ID: LIB3159-013-Q1-K1-H12
gggccgacgcggacgcgtacacgctaaggcgttgtctatcacttctcaactatctaatattatctcccctacgatgaaaaaaattgacggccgtggctggggacttggtatatagatgtgacgggaatgcgactgaanaagtgtttgcgccggagaaatctgtcatcnnattgcactacnnaatggcaacatgaaatcctttggcttgaaattaggtattaccggagtacaagaaagtacctggaagaggtttncttgtccgaggagaatcgatttatggaccgagtgcaancgtaaaatccgtgaacgtagagttggaacccgaaacgagaaccgattgcgttaatcntgtgacgcagagtttggatctcgaaatcagaacaatctggaatagacatcnagcttagcctcaactgaagttntgtgtcggcaaaattgtgaaccgagaatgtaattctggtggtggagcctaggatttttttgagtggagattccaaacatgaaagtagtaaacactaatatatatacggtagtataaatttg

SEQ ID NO: 14216 - DNA, 304 bp, Zea mays
  Clone ID: LIB3159-013-Q1-K1-H5
cggacgcgtggggtccaactggaggttcatgacgcgcgacgacgggccggcgtggagcacgaggcaggcgccgccgggcccgctccagctcatggtggtggtgacgggcgggtacgacggcaagtgggtgtgggccgaccgcgaggtgctgccgcggtggcggcgcgccggcgaggtctacgacacgggcgtccagatcacggacgtcgcccaggagggctgcttcccgtgtgacacgcacgagtgggaagaggagtgacggcaccagcagagcagaggctgcaacggaactcgctgaggactg

SEQ ID NO: 14217 - DNA, 446 bp, Zea mays
  Clone ID: LIB3159-013-Q1-K1-H6
cacccacccacccactcgcttcagccgccttcgccgcgcgtacaagcaggtggagacaggaggccgggtggccacggcctgcgctcgcggacgcgcgacctcttcgcgcgccccttccgcaagaagggctacatcccgctcaccacctacctccgcacctacaagatcggcgattacgtcgatgtcaaggtgaacggcgccgtccacaaggggatgccgcacaagttctaccacggccgcaccggtcgcgtctggaacgtcaccaagcgcgccatcggcgtcgaggtcaacaagcaggtagacaacgcggatccctttttcgcagaagcaattacgattagtgcgctggcgcatcttctgatcgtttcattctaagaaatgtaacgctttaatatagaatggcggctatttgctgacgtgttgtttgatttggatttatagaattt

SEQ ID NO: 14218 - DNA, 344 bp, Zea mays
  unsure (1)..(344): unsure at all n locations; Clone ID: LIB3159-013-Q1-K1-H7
gccccgtantgcantgcatcagtgtgctacctcctcattcctctcactccatcacaaacgcggagcggtctctaaagctcggagcgaggctcaaaagcnatggcggcatccaagaggctgctgctggcggcgctgtgcgtggtggccgtggcgctgctcgccgagcagtctgagtcccacggcctgaaggaatacgtaggcagcgactcgacgcccgagatgcagaccttcttcaagcccagaggccgtggcgctcccgagaggccctggacgcgtcctacatgcccgccgccaccatggccgcaaagccggaggccactgtaatcccgaccaccacgggcacc

SEQ ID NO: 14219 - DNA, 169 bp, Zea mays
  unsure (1)..(169): unsure at all n locations; Clone ID: LIB3159-013-Q1-K1-H9
gattgtgaatataacggtttcatttaacgggttaccctctttctgaatctggcgggatgatcgcaccatttaacggaggatcacgcctcnnatagctctaacaacagcagaananncggcacangaangngggtagcatgtactttttttttttatttttattacctct

SEQ ID NO: 14220 - DNA, 202 bp, Zea mays
  Clone ID: LIB3159-015-Q1-K1-A1
cgatgaagcatcagtcggaattggctcacggcgctaacgcggggctggacatcgcggtgcggctgctcgagcccatcaaggaggagttcccaatcctctcttacgccgatttctaccagctcgcgggagttgtggccggggaggtcaccggtgggcctgagattcccttccaccccggtagggaggacaagccttaaccccc

SEQ ID NO: 14221 - DNA, 179 bp, Zea mays
  Clone ID: LIB3159-015-Q1-K1-A3
aggggcgacgacgcgtccgcttgcttccatgcttgacattgaacacggagcatgctcctgaacttgatgcctatgaggcgcgactctttctctaccttggcagtggaggaagttgatgctgaatcctccctggccctggagctgctcttcatcagctctagcaggcctgcaaacggcct

SEQ ID NO: 14222 - DNA, 299 bp, Zea mays
  Clone ID: LIB3159-015-Q1-K1-B1
gcgtccgatcaggttgtatgctcattgtgtggcactgaacaggaggtgtgtgaccgaacctttacggaggatcttttaccagacattataggtgtttcacctgtatcatcatggtttcttgtccgttggcaggtgcgacaagtatgtatcaattgcggtgtttgcatggggaaatacttttgtggtttgtgcaaactcttcgacgatgatgtctttaaacagcattatcactgtaactgatgtggaatatgttgaatcggtgggagggtgaaatttcttcactgtcaaaatgtggatgt

SEQ ID NO: 14223 - DNA, 339 bp, Zea mays
  Clone ID: LIB3159-015-Q1-K1-B10
ggaaattcttgcatctgctggtgttcagattaacagctgctatccacgtggtgtgccggcgatgcttcctttgcctatggctgcacttgtcagcttgacaattacatttaagctagataggagtttggagtacattcaaggggtcattggacatgcactagagaactgcgcagggggaagttcctggccaagcatgcccattatcggggcattgtggacacagaaagtgcgaagatggcatgacttcattgtcctctcttgtatgcgttctccatttggcagagacaaagatgcagttgcgcagctcatcctaagctgcttttcgtcctttctgcattc

SEQ ID NO: 14224 - DNA, 238 bp, Zea mays
  Clone ID: LIB3159-015-Q1-K1-B11
ctcatacgcctatggtgcggtcaagaagtccatccacgcgtacgtcgcgcgtgcgggggccaccgtcgtcgaggtgcccctcccattccccgtcgcgtccgccgacgcaatcattgccgagttccgtgctgcgctcgcggtcgccaaggaaggagggcgtagggtcaggcttcgagtcatcgaccacattacctccatgcccattgttgtcattccagtcaaggagctcgtcgccatt

SEQ ID NO: 14225 - DNA, 457 bp, Zea mays
  Clone ID: LIB3159-015-Q1-K1-B12
gaacggtattcctgtacgagtaatgaccaggcccggttctcagttactagggataaatgggcgggatgatgggccactggtaaccacatgcagtagagaagggatcaacaaaattagcttatctagagtggatgctcgaaccttttgctttggagttcgaattgttaggaggaggactgttcctcaggtattaaatttgatcccaaaggaaggtgaaggggagtcttttgaggatgctcttgctcgtgttcgtcgctgtcttggaggtggaggtgctacggacaatgctgatagtgatagcgacctggaagtggttactgaatctgttacagtcaaccttcgttgccctaatagcggatccagaatgaggattgctggaaggttcaagccctgtgttcacaagggctgttttgatcttgaaacttttgtgggaattgaataaacgcttacgcaagtg

SEQ ID NO: 14226 - DNA, 265 bp, Zea mays
  Clone ID: LIB3159-015-Q1-K1-B3
cgcgtccgatccgattcgctcttttggagtatacatcatatcctcactactaaccaagttaatactgcagtgacaacatgccacagagtgaacttgtattgatcgctcatcatttgaagtgtcacctccaactcatatgctgcacaatttgcgtacacccttattcataataactgctagaccaaagtagcttgtgtgccactttcattgtattgctgactcttaaaaaccagtatgttaaacaccagttggattttatacattt

SEQ ID NO: 14227 - DNA, 355 bp, Zea mays
  Clone ID: LIB3159-015-Q1-K1-B8
ccgccacacatctaaaggcgcatggccattctccaccgcggatcatggttggcctgtaggggattgcactgctgaaggactaaaggcttcattattgttatcaaagatttctcctgaaattgttggtggaccgatagaagctaatagattttatgatgctgtcagttgtctgatgtcttatatgaatgataatggtggttttgcgacttatgaactcacaagatcctatgcctggctggagctgatcaatcctgctgagacctttggggatattgtgattgattacccgtatgttgaatgtacatcaacatcaatccaggccctgacatcattcaaaaaactatacccttggcac

SEQ ID NO: 14228 - DNA, 371 bp, Zea mays
  Clone ID: LIB3159-015-Q1-K1-B9
cggacgcgtgggcggacgcgtggggtttgatatcaggtaaacatctgctattcgacacgtgtgtaatagtaagcagagaggagcaagtcctcattttttatatgtgcaatgttgctttcatgctacacgagaggggtgaatgctagttataaaacaatggattatttgacataatgtatatgagattttcgcaactattcttatgtactgcaatatttgaaataaacagcccttgcaagatgttagggtcctcctaaaacatatgaatgaccattggattagtctaacattactctttatgctttctataccatgtaagcatgacttttacaagttcacgaagaacttaatttaaacatggagttagcaca

SEQ ID NO: 14229 - DNA, 384 bp, Zea mays
  Clone ID: LIB3159-015-Q1-K1-C2
gaagcgcattcctcttcgctgtcagagattaacaggcccccttcaagaacatccaaaggcattgtatgatgcatttgttcttgcgatgtatgatatatttgccggaagcatcaccacatatatgttggggctttggttagtctcctcgttttttttcaaaggaggttgcatagggtacatagtgtaatcttttctatttcgttcctagatttgtcaagagatggcaattatttgttggagaaagctcgttgccacattctagtcattcttttcttagtggtttcactgctcatctggtttctgtaatttttcaattgaaggccaaatgagcaaagtagtaattggagatagaaatatgttactactggcctatctatcgatctt

SEQ ID NO: 14230 - DNA, 421 bp, Zea mays
  Clone ID: LIB3159-015-Q1-K1-C4
ttttccacgccttctttaagctcgcccttcccctcagccatggacacgacgaccggcggcccttcttggtggccaagcccatcttcctgctcgcgccccctcttttccacctctgcgcgtatcagctcgtccaacccccatggtgtttcctccctctcggctcccttgctccctccccatggcgttccccctggatgttggtgatctgttccccacggtgcaggcaaatgttctttccctccctgcagcagcaccttggtggttgtcgagcagcacgtcgcgcttgcgcagcctcggtcacgacgttgttcaccccgctaaccattggtgtcatacctcacgtgtcatgtgttcgccgaaatgcctaaacatgtagtctgtcgtccgcgtatccacagtcaattttagtcatggggaactt

SEQ ID NO: 14231 - DNA, 465 bp, Zea mays
  unsure (1)..(465): unsure at all n locations; Clone ID: LIB3159-015-Q1-K1-C5
cgggccggccccaccctcccaatagaccttggggaaaaataccttccggccggacctttgggggttccaaacctgatgaaggaaattactgttgtcatctcaaacgggagcagtcccactcatgttgatcagaagttaattgatggtccaaaccctaacaatcgccgaaagttgttcataccacttatccttgctgtggagtacttcttggtggtaaaaggaatccggagggcgatccatgcagatatcgcanacgggaaggtagatgactgggagcagcgttaccgggacctggtgggaagcagggacctcgtagagcagaaaggttctacctcccggaaccgcaaagcctaagttggtgtaccagaaaggattctattcgtgttgagacccacccactcgatctgctgcttctttttcctaaaattgtgctgggggctttatagagttcgctggtactacttg

SEQ ID NO: 14232 - DNA, 357 bp, Zea mays
  unsure (1)..(357): unsure at all n locations; Clone ID: LIB3159-015-Q1-K1-D1
accgtctcatcatgaggaacgtcaagggccctgttcgtgagggtgacatcctgaccctgctcgagtctgagagggaggccaggaggctgcgctgaagcccttgttgtcttggatgtaattctgttaattttgttcaatgtttgtcgaacttgccgtgtgacccatactatatctgctttgggatttagtaagcctggattgcagttttttttatgttcctggtggaaattgcaattgtttgtcggcatgttctcttgaatttaatgcgtacggtttctactactactacaatgatttttagcattctgaacagctntaatcccatgtgtccaatctgaaggtgttgttatatgtggt

SEQ ID NO: 14233 - DNA, 68 bp, Zea mays
  Clone ID: LIB3159-015-Q1-K1-D10
cggaaaaccccgggcgagcccacgcgtccgcgtacacttggtgctctttctcgatgctctcacctatc

SEQ ID NO: 14234 - DNA, 400 bp, Zea mays
  Clone ID: LIB3159-015-Q1-K1-D11
cagccaattgttaatgctgtcattgatggcgatgacatcatatacagagactacgtagacgtcagtgttgctgttggcacttccaagggccttgtggtgcctgttatccgagatgctgataccatgaactttgctgacattgagaaagggataaacaaccttgcaaagaaggcaaatgagggggcgctctcgattgatgacatggcaggaggaacattcactatctccaatggtggtgtctatggaagcctcctcagcacacctatcatcaaccccccacagtcgtcaattctggggatgcattccattgtgcaacgccctgtggttgtgaatggtgacattctcgcaaggccaatgatgttccttgcgctgacatatgaccacaggctgatcgatggca

SEQ ID NO: 14235 - DNA, 344 bp, Zea mays
  unsure (1)..(344): unsure at all n locations; Clone ID: LIB3159-015-Q1-K1-D12
aaaaaaaaaagggggggggggaaaanaaaaaaaaaaaaaaaagaaagaaaaaagaaaaaagagaaaaaaaaaaaaggagagggaaagaaggaaaaaaaaaaggaaaaaaaagaagaaggaaaaaaaagagaaagaaaaaaaaaaaaaaaaaaaaaaagaaaaaaaaaaaangaaaggaaaagagaagaaaaaaaaaaaaaaaaaaaaaaaaaaaaaaaaaaagaaaaaaggaaaaaaaaagaaaagaaaaaaaaaagaaaaaaaaaaaaaaggaaaagagaaaaaaaagagggaaagaaaaaaaaaaggaaaagaaaaaaaaaaaagaaaaaaaaagaaagaaa

SEQ ID NO: 14236 - DNA, 355 bp, Zea mays
  unsure (1)..(355): unsure at all n locations; Clone ID: LIB3159-015-Q1-K1-D2
ggcagctggtgtcacagtggttctgactccaagtcgcagatgagcgaaaagctggcttgatagtgcattattcaaccccctccgaagtatgttctacctggacaaaagatctaagaaggctcctgttctagctttattatcaaggactcgctaagttgaaaaccagcgatgctgaaacggttgtcaacatacatgctgctagcgaaaagtttgctgagttgattcctctcctcgagtcaaacgctgacgtgtatgctctcaaagagaagctggaagatgagtaccttgagataccaagagacagcgtgaagcgtgttnttgcagggcttatacttcgagaaataaaagaagtttt

SEQ ID NO: 14237 - DNA, 393 bp, Zea mays
  Clone ID: LIB3159-015-Q1-K1-D3
ccgggagccccgacaagtactggagcccccaccccaagaccggcgtcttcggcccggcggcggtggaccccaagctggccgctggtggcgcgccggacgccggcgcggatgctgcaggaggcacggtgctggaccagaaggtgtggttccgcccgctcgaggacgtcgagaagccgccccccgccgcgtgagccgcgcggcgctgctaggccagcccacactgctgctcgctcataaaaagggcggcgggagagcctggcagtggcaggcactctgctcgtgctcggccgggctgggctccctgcttatatcactgcaatattatactactagtagtggtgcttgatagcaatgtgtggctgtgctaataccagtataatactggttctacta

SEQ ID NO: 14238 - DNA, 380 bp, Zea mays
  Clone ID: LIB3159-015-Q1-K1-D4
gccgtccgcttagccctcgcgccgccgccgccgtgcccagcgctcgagctcctcgcctgccgcgagctcgcgccgcaacgccaccatgaagttcaacatcgcgaacccgtctaccgggtgccagaagaagctggaaatcgatgacgaccagaaactacgtgccttttatgaccgaaggatctcccaggaggtcagtggtgatgctctgggtgaggagtttaagggttatgtcttcaagatcatgggtggatgtgacaaacaaggcttcccaatgaagcaaggagttctgacttctggtcgtgtccgccttctgctccacagaggcactccctgcttccgcggttatggcaggcgtaatggtgagcgcaagaggaaagtct

SEQ ID NO: 14239 - DNA, 338 bp, Zea mays
  Clone ID: LIB3159-015-Q1-K1-D6
gtccggttgccccatatccctcgtcccaagatgaaggtgtgcatgcttggtgatgcccatcatgtgtgggaggcctagaagatgggacttgactacatggatgttgaggctctcaagaaaatgaacaagaacaagaagcttgttaagaggcttgccaagaagtaccatgctttcttggcatcagaggccatcatcaagcagattccccgtctccttggtcctggtctcaacaaggcaggcaagttcccgaccctggttactcaccaggaatccctcgagtccaaggtgaacgaaactaaggcaaccgtcaagttctcagctcaagaaggttctttgca

SEQ ID NO: 14240 - DNA, 249 bp, Zea mays
  Clone ID: LIB3159-015-Q1-K1-D7
acgcgtccggtcatcaccttctctactactatggcattctttctccaagccgcggccaccctgaggcgccgttcaaaatcggtggtcgggcaccctttgcctcactgccttcccgcccttcgtcgcaactcgcctgcagggcgttcggcgtttactccagcgccgtcataatcacatgctccctgcatgacgtcgccagcatgttcgtctactcctctaatcttgccagcttcgcgctctccacctttg

SEQ ID NO: 14241 - DNA, 312 bp, Zea mays
  Clone ID: LIB3159-015-Q1-K1-D8
ggcagctgtgtgttcagcagtggttctgactccaagtcgcaggatgagcgaagaagggtgtacttgtatagtgcattattcaaccccctccgaagtatgttctacctggacaaaagatctaagaaggctcctgtttctagctttattatcaaggactcgctaaagttgaaaaccagcgatgctgaaacggttgtcaacatacatgctgctagcgaaaagtttgctgagttgattcctctcctcgagtcaaacgctgacgtgtatgctctcaaagagaagctggaagatgagtaccttgagataccaggagac

SEQ ID NO: 14242 - DNA, 294 bp, Zea mays
  Clone ID: LIB3159-015-Q1-K1-E2
caaaaggatgagctgccctgccatggcacagctcctctccaataccctgtactacaagcgcggcttcccatattacgccttcaatgtgctcggtgggcttgacagctaggggaaagggtgtgttttcacctatgatgcagtaggttcctatgagagaactggttatagtgctcagggaacgggatctactttgattatgccagtcctggacaatcaactaaaatcaccaagtcctctattgctccctgccagggatgctggcacaccattgtcggagtcagaggccattgatct

SEQ ID NO: 14243 - DNA, 209 bp, Zea mays
  Clone ID: LIB3159-015-Q1-K1-E3
cttatcttaatgttaatgctaaagcaattggggtttctcttttagcttaccactaagagggtttatcaaacaagtgtgcatcctatgcttatagcaatattgtccctgccactgctatccctgattactggattggtcttgatgttggccctgataccaccaaaacattcgacgaatcattggacactcaccaatactgttatttggaa

SEQ ID NO: 14244 - DNA, 449 bp, Zea mays
  Clone ID: LIB3159-015-Q1-K1-E4
tccggcctgatgaaggcgatggagggtagtgagtttggtgcaaactgtgcacccaccgtggtgacctatacgtgtttggtgaaatgcctctgcgggaaggggagggcggtcgaggctctcgctgtgctggataggatgacagagagacgggtgatgccaaaccgtgtttttatgcggacgctggttgaagggttttgcactgagcagagggttgtcgacgcgtatgatgtggtggagcgtgtaattggtgatgggagtgtttcgagtacacagtgctacaatgttctactcgtttccttgtggaaggttggcatgggagaagaagctgaaggactggcacggatgatgatgacgaaaggggtgcagctgaccccactcgctggcagttgtatggtgagggaactgtgcataaggaagagatcgttggatgcttgctactggctgggagt

SEQ ID NO: 14245 - DNA, 375 bp, Zea mays
  unsure (1)..(375): unsure at all n locations; Clone ID: LIB3159-015-Q1-K1-E9
gctttctcgagctccaccggcagccaagctacgtgttcccaccctagtctactctagcggcccttgtcctgctgcttgccttgcttgcgcctgtgatactgagcgggagatggaagcgtacgcggcaatggcgtcgccgcccacgaaaggcatgggcgtggacaagctcagctacgagatcttctccctgctcgagagaacgttcctcctcggccccggcacgcctccccgggcgcttctggacggcgggcgcgtgcgggtactggcgatcgacggctgcggcgcgggcgccgaggacgcgctcctggccgncgncgcgctcgcgcggttcgaggccgggctgcgcgaccgcaccggcgacccggacgcgcgcgt

SEQ ID NO: 14246 - DNA, 422 bp, Zea mays
  Clone ID: LIB3159-015-Q1-K1-F1
gttcggtttgtgactgcataacttcaaattcagaatgttaatgccaccaacatggagaagaacacaccactccactgggcatgccttaatggacgtatagaggtaatcagggctttgatctcagcgggggctagcgtgagtgctctgaacagccacgagaaaacgccaatggacgaagcggtgaccacaggcaagatggacgtgatcgacgcgatcggtgcggcagtagctcaagccgagctcgacgccgttactgtctcctaaaaggacctgatgagtacctggagctttgaatgacttgcagccttgttcttatctcccagcggttctgtctgtatcactcgcgaacctggatcccccgacgggccagtatccgggcaatatctatactgacggcaatcgcctgttagtgtcattggcac

SEQ ID NO: 14247 - DNA, 434 bp, Zea mays
  Clone ID: LIB3159-015-Q1-K1-F11
ctaacttcaaggtattttatacagttgataaaccgtcaactgactggaggggtggtgttggttttgtatcaaaggacatggttttgaaaggtttgccaggcccagcggaggactctctgattcttgtttgtggtccaccaggaatgatgaatcacatatctggagacaaggccaaggatagatcacagggcgagctctctggcgttctgaaagacttaggatacaccgcagagatggtatacaaattctgagaagacagtagtagactctgctgacgcacacacattcttgctgccctgcagtcaataaaccacacctgaactttttgttgttgttgcagcatctggctctgaactggaaacagttttgacttgtttccctatgtaataataatgctcatccgagaattctaggtctagcttcgggtgttctgc

SEQ ID NO: 14248 - DNA, 371 bp, Zea mays
  Clone ID: LIB3159-015-Q1-K1-F2
cgaagtcgtccacagaaggagggtgggcgctgtaccgggacctcgcgtccgtgtacgtcgacgcgggccagcttctgggctctgtgaattcgccgccggtggaggccggggaggcgaggatcagccagagggaatggatcacctacgacttcctcgtcatcttgcacgccggcctcggcaggccagagaggataagggacatctggaggtccatggtggcgacctcgcagtcgcagtcgcagcagcagcagcgcatgacgagccggaactacgtctgcgtggtctcgtcctacctggcgtgcgggcggctggaggatgccggggaggtcgtcgaccagtggcagcgctctaaggcccccgagttcgacgtc

SEQ ID NO: 14249 - DNA, 339 bp, Zea mays
  Clone ID: LIB3159-015-Q1-K1-F8
cgagcaattcgctgatgaggataacaattccagaagaggagctccacctgcagcggcatgttccatcgaaaatctttcgtctgtggtcatctccaaaggctatgagataaacggtggtgtaacctgtccagtctgcaaagatgacatgcctatcaccactgtagcaaaacagctaccatgcatgcatctctatcattcatcttgcatcttgccatggcttaattctaggaacacatgcccagtttgtcgttacgagcttcctacagatgactcggaatatgagaggtccaagcatgccgcggtcaatgaaggaggtatccatggggtggagcgtaccca

SEQ ID NO: 14250 - DNA, 188 bp, Zea mays
  Clone ID: LIB3159-015-Q1-K1-F9
cactcactcaactcgaggccatggcgacttgattagtgttagcaccacagggggagcggcagggaattcaagcaagtggtgtgaggagttatggactgttgcatatgcagacccacggcttacgtgtacaggctttcgaggaactccatctgtgctccatgccacgagggcaccaaggcactcacctc

SEQ ID NO: 14251 - DNA, 438 bp, Zea mays
  Clone ID: LIB3159-015-Q1-K1-G1
ccgaaaccagaggtgccgcacccagtgccggagctgcccaagcccgaggtgccaccgcagccgacagccgtccctgagctcccgaaacctgaggtgccgtacccagtgccggagctgcccaagcccgagctgacaccgcacccggcggccgtgcccgagctgccgaagtctgaggtgccgcacccagtgccggagctgcccaagcccgaggtgccaccgcagccgacagccgtcccggagctcccgaaacctgaggtgccgcacccagtgccggagctgcccaagcccgaactgcctcctcacccggccgtcccagagcttccaaagcctgaggtgcctcaccaagtcgcgccagagctgccaaagcctgaactccctccttacccgaccgtgccaaagctgccgcacccagaggttccggaagtgccaaaccacgag

SEQ ID NO: 14252 - DNA, 428 bp, Zea mays
  Clone ID: LIB3159-015-Q1-K1-G12
ccatggccgctgtcctcaggctagagcaggtggacctgaggaggaggcatgggctggccaaggtggtgggcacggtggtgagcatcggaggggccaccgtcataaccctgtacaagggcctgccgctgctccatcacagtgatgtgcacgtcaagtcgtctccggtgacgctgtcctcctccagcggcagccccatcctcaactggactctcggctgcgtcttcatcctcggccactgcctctcctggtccggatggatggtccttcaggtgccggtgctgaagaggtacccagccaggctctcggttctgtcactgacctgcatcttcgggctcctccagttcctggccattgccgccttcaccgaggaggacctgagcaggtggaaagtccgctcaggaggggagctcttcaccatcctatacgct

SEQ ID NO: 14253 - DNA, 147 bp, Zea mays
  Clone ID: LIB3159-015-Q1-K1-G2
gttggattgattttgattctcctgcagctggatgactgggtgctgtgccgcctgttcagcaggaagatctagtgggagaagatgcatcatcataaggagaaggagaaggagaagaaggcgatggagtcggatgcgttgcttttgcac

SEQ ID NO: 14254 - DNA, 457 bp, Zea mays
  Clone ID: LIB3159-015-Q1-K1-G4
cggacgcgtgggcgagcagcgcgcccctgtcatcatgtccatctgatgcagcttctgcggctgcttctgccgccattgaagacagcgtgaagcatttcctccaggcgccacttgaaaacagtgggatcatcccaaacgcagcagtttttcagaccaagccagcttctctgcaccgtgttgctagcctggagaacctgcagaagaggatcgtcggggatgcaatgtattccgagaccgcgtcaacgacattctcagatcctgaagctcttgccgataggtaaaggttgctcctgtcctgtgatgaacagccgtgtgatgctctagcggcctaagtgcttctggtaatggaagttgtagcacccatgcgcctgggtggggtctacacagtgatttgtacactattttgaaggttaataataattggtgagaaatgatctcaatcctttgtacctatata

SEQ ID NO: 14255 - DNA, 428 bp, Zea mays
  unsure (1)..(428): unsure at all n locations; Clone ID: LIB3159-015-Q1-K1-G6
cctccattttatttgaccaagatgtataatcctcccagttggcattacatgtcctactacgagcatttgcataaccgccatgaggagaagggctgcctatatgcatgcctgttcactgcgtgctgctgcttctgctgcttcgagacctgtgagtgctgtctcgaggctatctgctgctgctgctagatctgcttggagggcatgggcgttcatcatcgtggagatgtggccatgcttgacacccaccgtctaataaaatgctgtacttatatgcacgcactttagaaatgcattagntgtctgcttgatgtgaacttttgtgtgtgtgtgcgcgcatcttcatttgcacctgaaaaatgccttattatttgtgaatgtctgtaaatcctttttatgtatcttgtcaaaagaactttataatgttccat

SEQ ID NO: 14256 - DNA, 405 bp, Zea mays
  Clone ID: LIB3159-015-Q1-K1-H2
ccagcctttcgctagggtttaaccaccggcggcgcgcgcgacggcggcaagatggtgcagcgtctgacctaccgcaagcggcacagctatgccacgaagtccaaccagacgcgggtcgtcaagacccctggtggcaagctcgtgtaccagtacaccaagaagagagccagcgggcccaagtgtcccgtgaccgggaagaagatccagggcattccccatctgaggccagctgagtacaaaaggtccaggttgtctaggaaccgcagaactgtgaaccgtccctatggtggagtactatctggaactgcagttagagaaaggatcatccgtgctttcctggttgaagagcagaagattgtcaagaaggtgttgaaattacagaaagaccaaagacaagactttctc

SEQ ID NO: 14257 - DNA, 237 bp, Zea mays
  Clone ID: LIB3159-015-Q1-K1-H3
gccgccgccgccggcggtaccaccaccactactaccgtcaagtgcctcgccgacgccggcgtcttcctcgacgccatcgacgtctccggcgggcgcagccttcggtcctactactccacatcgtggcatgcagggggtgggtccaaacctgccgccggcgtgcattgcccgttggacaccgcctggtgcttcttccttaagaacgtgatcgatggcgtaaccaccccaattttcttg

SEQ ID NO: 14258 - DNA, 425 bp, Zea mays
  Clone ID: LIB3159-015-Q1-K1-H5
ccggccagtcttgttgaaccatccatttcatttgtttatgaggattgccatcttttgccttaccgaattttgtgcgtttctaacatttgtattgtccgttgcaaatcaaataatatggcagctgtcgacacattcctcttcacctcggagtctgtgaacgagggacaccctgacaagctctgtgaccaggtctcaaatgccgttcttgacgcttgccttgctgaggaccctgacagcaaggttgcttgtgagacctgcaccaagaccaacatggtcatggtctttggtgagatcaccaccaaagccaatgttgactacgagaagattgtcagggagacctgccgcaacattggttttgtgtcaaacgatgttgggcttgacgcccaccactgcaaggtgctcgtgaacattgagcaacattcccc

SEQ ID NO: 14259 - DNA, 245 bp, Zea mays
  Clone ID: LIB3159-015-Q1-K1-H8
ataatatacttgcatgttgctgtgatccaagtgacgtgaatatatatatgctactatgtcgtgctttagtttgttctgttgtgaaatgaatatgtaatcttcgattggaaggaacgatcgatttgctatcccaatctagtgtatgttttgacaaaatcctgaataaactatgccttctagtaacgcgcgcgcgctcttgtgcttgtgtgattcgtttattttgaatttattttttagggataaaa

SEQ ID NO: 14260 - DNA, 206 bp, Zea mays
  Clone ID: LIB3159-016-Q1-K1-A1
tgtcgatgtagtgtgcgagcaatgtatttgttttggctacagctgttcctgtcgtctgtgcgtaaaacattagctatgtatctatccatatctgcatatttgaatgtatggtcgttttctcaaaaaaaaaaaaaaaaaaaaaaaaaaaaaaaaaaaaaaaaaaaaaaaaaaaaaaaaaaaggataacatctaaagtacccaagctt

SEQ ID NO: 14261 - DNA, 410 bp, Zea mays
  Clone ID: LIB3159-016-Q1-K1-A2
ccgctctcgcctctcggccttctccttgtgccgccgaacaccctcacaagagtcggcctctcgatttctcagtccagccgcagcagcccccttccctccctcctccatcaggtgttgcctcccgcagatccaagtcggaattcggtccttcgtccccaaaccaccaatccgtcctttggaatgctacagggaagtgaagtgatgggggagtgcgaggacggcaaggagtacaggtgctgggaggagctgctgccggacgcgctgggcctcatcttccgcaacctgccgctgcaggaggtgctcaccgtcctgccgcgggtgtgcaagtcctgggggcgggtggtggccggcccctactgctggcaggagatcgacatcgaggagtggagccagcagcagagcaggccgga

SEQ ID NO: 14262 - DNA, 434 bp, Zea mays
  Clone ID: LIB3159-016-Q1-K1-A3
gttcatggaaaatatccacctagtggaccaaaccttaaattcgacttgctaaaggaccttcgtgcattaacattaaagaaaggagttagcttggtcctccatggagcatctggtctatctcatgagctcgtaaaggagtgcatagacttgggcgtgagaaaattcaatgtgaacaccgaggttcggaacagctacctggcgtccctcagaaagccagaaaaggacttgattcaggtgatggcgtctgctaaagaggcaatgaaagctgttgtagcagagaagctgcgcctgtttggatcgtgtgggaaagcctgagcgaagtacttgcgttgcgccggcaacatgcagtacaagaccgactgcatcatcgggttcgtgatgctgctgctactgtgcagttgcttacagttacagctcattgcgttgaacagctg

SEQ ID NO: 14263 - DNA, 333 bp, Zea mays
  Clone ID: LIB3159-016-Q1-K1-A4
gcaaaatacggtattgaagagatgtgccgcgaccaatggaactgggccagcaagaacccttatggctatggatcacctgactctatcaagcagaatggtcaccaaacaaacggatccgctgactcctccaagcagaatggccaccgcacaaacggttcaactgactcacccaagcggaacggccaccatgcgtatgggtctgctgactcacccaagcgcaacgggcactgcgtttttggatcatcagacctcaagccgaatggtaatggccacctgcgctgagcagaactgtttggcctgtgagctccctgtacattcggttgcgatgtgagc

SEQ ID NO: 14264 - DNA, 448 bp, Zea mays
  unsure (1)..(448): unsure at all n locations; Clone ID: LIB3159-016-Q1-K1-A5
cgggccgaccgcacgcgtaccgttcatggaaaatatccatctaatggaccataccttaaattccacttgctaaaggaccttggtgcattaacattgagagaaaggagttagcttggtcctccatggagcatctggtctatctcatgagctcgtaaaggagtgcatagacttgggcgtgagaaaattcaatgtgaacaccgaggttcggaacagctacctggcgtccctcagaaagccagaaaaggacttgattcaggtgatggcgtctgctaaagaggcaatgaaagctgttgtagcagagaagctgcgcctgtttggatcgtgtgggaaagcctgagcgaagtacttgcgntgcgccggcaacatgcagtacaagaccgactgcatcatcgggttcgtgatgctgctgctactgtgcagttgcttacagttacagctcattgcgttt

SEQ ID NO: 14265 - DNA, 258 bp, Zea mays
  Clone ID: LIB3159-016-Q1-K1-A6
gacgcgttcccttcgtcttctctggtgtcaacacccacagagcggcttggattctagccggcgggcgccccttcctcctctcatcagtgtgctccgcaaccaatcgaatcgccttgccccaaaccacaatccgtcttgaagctacagaaggaagtgaggggagtgcagacgcaggagtcaggtgctggaggagctgctgcggaccctggcctatcttccacctgcgtgcagaggctaccgcctgccggtgtcaagtct

SEQ ID NO: 14266 - DNA, 436 bp, Zea mays
  Clone ID: LIB3159-016-Q1-K1-A7
tcccggtcggaccacgcgtccggccaggccaccatggcggaggatgctactttcagccacccgtcacgctacgtcaagctgaccaaggaccaggacgcccccgccgaggacatccgccccggcgagctcaaccagccagttcacgtcccgcagctcgaaggccggaggtgtagcgagtgcggtcaggtcctgcccgagagctacgagccgcccgccgacgagccctggaccaccgggatcttcggatgcaccgatgacccagagacctgccgaactggattgttttgcccctgcgtgctgtttgggcgcaacgttgaggctgttagggaggacatcccttggacaactccttgcgtgtgccatgctgtattcgttgaaggagggatcacgctggcgattctgacggcgatattttacggtgttgatccgaggacgt

SEQ ID NO: 14267 - DNA, 335 bp, Zea mays
  Clone ID: LIB3159-016-Q1-K1-A8
gttatattgggcgagcctgggtcaagtaggtggtcaaggccttcggagtctccaaccataagaagaacgaggaggaggccacagtaggtactcgagtgttgtcactcccttcagtaaaatctacagaccatgccccagtgatagttattaccatgattatctccaataacatctcaaggttaataatgtagaaatgtatatgccatcactggtttctgcctttctcttacattccatgtatcatctattatgcaaaacgagtcgaaatatcagttccagtatctatgataatcttgacctttgtatactgggaatatattttctgatttagcctc

SEQ ID NO: 14268 - DNA, 385 bp, Zea mays
  Clone ID: LIB3159-016-Q1-K1-B1
gctcgatctccctccgccactcccatccatttcctcgctcccagtcccccggaagctacgaagcatggcgtccgtcaccgcccgcgccccggtcgcggcccttcgcccgtcgtcggccttccttggccactctagccgcctcggccgcaccgcgtcgcccacgaggcgcagcctcaaggcggaggccaagggcgagtggctccccggccttccctccccctcctacctcgacggcagcctggcgggtgacaatggcttcgacccgttgggcctggcggaggaccccgagaacctgcggtggttcgtgcaggcggagctggtgaacggccggtgggccatgcttggcgtgggccggatgctcatcccggagtgctgaccaaagccg

SEQ ID NO: 14269 - DNA, 488 bp, Zea mays
  unsure (1)..(488): unsure at all n locations; Clone ID: LIB3159-016-Q1-K1-B10
tcggggctctcctctcccgtcaacagctacatttcacaaccgngagctcncnaatgaacgggtggcgcaatttcaacgggggggccgggagtaaactacaaaatgattctctgagggacgcgattgcctcaattaccaatgattcccgtgagaagcagcgcaaatttgttgaaaccattgatctacaaattggactgaaaaactatgaccctcaaaaggacaagcgcttcagcggttctgttaagctgcctcacatccctcgccctaagatgaaggtttgcatgcttggtgatgctcagcatgttgaggaggcagagagaatgggtatagacaatatggatgtggaagccctcaagaagatgaacaaaaacaagaagctattgaataagctggcaaagaagtaccatgctttccttgcatctgaggctatcattaagcaaattcctcgtcttcttggtcctggtcttaacaaggcaggaaaattccct

SEQ ID NO: 14270 - DNA, 366 bp, Zea mays
  unsure (1)..(366): unsure at all n locations; Clone ID: LIB3159-016-Q1-K1-B11
cttcaatcctcatnattttttccccaanttttttttaccccccanaaanaataccttcacacctggttttttttgacaatgctgctctccaacaccttattttctnntnaaaatncttttttcctacttttacataaatttaatatattttttctcttatcacaacatttattttttttttttaatcttaacatatatttaatcctttatattttcactctatcttcaatctccttccatttattctttatcttaacctttatttttatattctctttttacctatccttattatttctcttctaattttttttttttttatatatactttttattttttctctttcttctttttcatctttcatt

SEQ ID NO: 14271 - DNA, 450 bp, Zea mays
  Clone ID: LIB3159-016-Q1-K1-B12
gtctttggtccagtcctgtgcgttaaagaatttagcactgaagatgaagccatcgaacttgccagggatacacagtatggtttggctggtgctgtaatttctggtgatcgggagcgctgccagaggttatctgaggagattgacgctggatgcatctgggtaaactgctcgcaaccctgcttctgccaagctccctggggcgggaacaagcgcagtggatttggacgtgagcttggagaagggggcattgataactacctgagcgtcaagcaagtcacggagtacatctctgatgagccgtggggatggtaccaatccccctccaagctgtaaactggcaagacgaaaatttgtctgtttcggtagaataaatatatctcgatgctatacagaacgaacccgtgtatcacattgaatgacatggtgaaaaaggcacatctgcaggataaa

SEQ ID NO: 14272 - DNA, 358 bp, Zea mays
  Clone ID: LIB3159-016-Q1-K1-B2
gttatattgggcgagcctgggtcaagtaggtggtcaaggccttcggagtctccaaccataagaagaacgaggaggaggccacagtaggtactcgagtgttgtcactcccttcagtaaaatctacagaccatgccccagtgatagttattaccatgattatctccaataacatctcaaggttaataatgtagaaatgtatatgccatcactggtttctgcctttctcttacattccatgtatcatctattatgcaaaacgagtcgaaatatcagttccagtatctatgataatcttgacctttgtatactgggaatatattttctgatttagcctcaaaaaaaaaaaaaaaggcgggcc

SEQ ID NO: 14273 - DNA, 368 bp, Zea mays
  Clone ID: LIB3159-016-Q1-K1-B3
atgacatgcattcatcgtggtgaaaaaggttattttcactttagagatacaattccttggacctgtctcgaatgcacataatgtgaatccattacaactcaacaaacgtgcttattattttactacaccccacgcaattattactgccacacgtctaagactcatgcattcttggataggaggcggcggcggcacagtaactagctagctagacggccctaggaacaaggtagagcggctcgttcctgcgaagcatcagcccgaacgtctcgtccatgctcaccttcccgccaccgtcttccttctcattggggacctcccagtcgaaatggtacatgaggttggcgagcatgatctccatggtcgcg

SEQ ID NO: 14274 - DNA, 397 bp, Zea mays
  Clone ID: LIB3159-016-Q1-K1-B4
gcgggcggcaccgcctccgcctcgccgcccttcgtgctcacctccgcctccgcgccctcgtccaccggcggcggcggcccggtcgtctccgagcagttcggcgtgctcgtcgacagcaagcccccggcgccgcaccaccacttcgtgccgcacccgtacggcaacgtgaagctcgagcccgtcagttcccaccacggcgggttcctggacgactctgtcctgatgcagatgcactgcgggcagctgcagcctctcggatgactggttgtttgtgcagcaacaatggtagaaagagggaaatgcctctcgtctctttggccagttacgaggggtggagggtaccataccgctctgttgcgttgcgcgtgtctgttgttggatttcaatcaggcaaata

SEQ ID NO: 14275 - DNA, 440 bp, Zea mays
  Clone ID: LIB3159-016-Q1-K1-B6
cgctgtaccaccgcttctgccagctcgaccgtaacggtggtggcttcgtctccgctgacgagttcatgtcggtccctgagttcgccgtaaatcccctctcccagaggctcctgaggatgctggatgggctcaacttcaaggagtttgtagcatttttgtcagcttttagcccccgcacaagcctgcagcaaaagattgaatttattttcagggtttatgatactgactgcaacgggaaggatgcttttgatgacatcttgagcatcttgcgagatctgacaggttcatttatgacagagcagcatagacagatagtcttgattcatgtgttagaggaagctggatacacaaaggattcacatttaacactcccagactttatgaagatcatgggcaattttgagctcaggatggaggtggaagttccaattgactaaaac

SEQ ID NO: 14276 - DNA, 394 bp, Zea mays
  unsure (1)..(394): unsure at all n locations; Clone ID: LIB3159-016-Q1-K1-B7
ctccgcgttcccgctttccacccgccgccttcgccgccgcccaccttaccgtcccctgccccttgcccagcatgtggggtagcaccgacggcggaacgccggaggtcaccctcgagacctccatgggcgctgtctctgttgagatgtactacaggcacgcgcccaagacttgccggaacttcgtcgagctcgcgcgacgtggctactacgacaacgttatcttccaccgcatcatcaaagatttcattgtgcaaggtggggatcctacaggaaccggcagaggtggcgagtccatctatggagcaaagtttgaggatgagataaagactgagttaaagcacactgnggctggaattctgtccatggcanatgctggcccaaacacgaatggaag

SEQ ID NO: 14277 - DNA, 336 bp, Zea mays
  unsure (1)..(336): unsure at all n locations; Clone ID: LIB3159-016-Q1-K1-B8
ccgggccgacccacgcgtacgattgtagtctcgtgtctgacgattctctatatgcatctatgatcaccatgccgatcccggccacagcccgaaacgcggacctgccagacatacacctgatgcagcagcagcatgactcatcagccgccggtgccgacgcactgacgactgccgacctctgtgatgccgccgccttgtccttaacgaagacacatgcctttcggcaacgactactgaaaatgcgattgcgtgaaggtcaaggtctgggttggtgagaacgccgaccactactacgtnctctgcaggctactgatcagcaggatgctcacagtcacc

SEQ ID NO: 14278 - DNA, 393 bp, Zea mays
  Clone ID: LIB3159-016-Q1-K1-C1
gggttttgctgctctccgaccccgagctcctaaggccgcagcatcaggcgcggcccccctggcgtgtgaccgagatggcgctgccgaatcaggggaccgttgattaccccagcttcaagctcgtcatcgtcggcgatggtggaactggtaaaactacatttgtgaagaggcatctcactggagagtttgagaagaaatatgaaccaaccattggtgtggaagttcatccgttggatttcaccactaactgtggtaagatcaggttctactgctgggataccgcagggcaagagaagtttggtggcctcagggatggatactatatccatggccagtgtgcgatcatcatgtttgatgtaaccttcaggcttacttacaagaatgttcctacgt

SEQ ID NO: 14279 - DNA, 502 bp, Zea mays
  unsure (1)..(502): unsure at all n locations; Clone ID: LIB3159-016-Q1-K1-C11
cgtccgaccaaagtgttgatttgattattccattacgagattgccaaancgatcgcagaaacttttgtccatcggtgctggacgcactaggacggtgctgggaaagcaggaactgcaatcttgatgtttaccagcagccagaaaaggacagttatgtcacttgagcgtgatgttggttgcaagtttgagtttataagccctccgtccatagaagaagtgctggagtcatctgctgagcatgtcattgctacattgcgaggggtgcacccagagtcaactcaatactttcttggagcagctgagaaattaacagaagaactaggacctcatgcccttgcttctgcactggcacatctgagtggattttctcagccaccttcttcacgttctctgatcagttatgagcaggtaagaagtgacacaacaaaattacatatgcattgttctatattatacctagcatagaggtctactttccacagttaagtaagcatactttaca

SEQ ID NO: 14280 - DNA, 407 bp, Zea mays
  unsure (1)..(407): unsure at all n locations; Clone ID: LIB3159-016-Q1-K1-C12
cgcgctcctctacccactataaaagctttctacnactctcttctctctctctccaggggcacctttaaactgatcgaagacccataactccaccgccgacgacttgaccgcggtggtggacgaggaggcgtgcatgtacaccatgcagctggcgtcgtcgtccatccttcccatgacgctgaagaacaccatcaagctgggcctgctggaagtgctgcacaaggaggccggcggcggcaaggcggctctatcacccgaggaggtggtggcgcggatgcccgcagcgcccgactaccccaccgccgctgcggccatggtggaccgcatgctccgcctgctcgcctcctactacgtcgtccgatgccagatggatgacctatacggccggtacgagcgcctctactcct

SEQ ID NO: 14281 - DNA, 275 bp, Zea mays
  Clone ID: LIB3159-016-Q1-K1-C2
cttcctagtctcgtctccgcgccattctccaaatccatctatcatcaccatcccgatcccagccccagccccagccccagccccgccagacccagacccgatgcagcaacagcaggacccagcacccgccgatcccgacccactgccgccccccgacctcggtgatgccgccgcctcgtccgcaacgcagacgatcccttcccgcaacgcctcctccaagtacgatttcgtcaaggtcaaggtctggctcggggagaacgccgaccactactacg

SEQ ID NO: 14282 - DNA, 396 bp, Zea mays
  Clone ID: LIB3159-016-Q1-K1-C3
accagccgcgccacttctgcaagaactgccagaggtactggactgccggcggtgccatgcgcaacgtgcccgtgggcgcaggccggcgcaagagcaagagcgcgtcggccacttcccacttcctccagagggtcagggccggtctgcccgtcgacccgctcgtctgcgcggcagccaagactaacggcacggtgctcagcttcggctctgccatgtccagcttagacctcacggagcagatgaaacagctcaaggaaaagctcgtcccgatagcgggggacgagcgctcagttgggtctcgcactcaaggaccttctgccaaggcagaagacccggaccggaaggagaatgttacagcagataaatccgcgagagttgttcagcattcatgcatga

SEQ ID NO: 14283 - DNA, 392 bp, Zea mays
  unsure (1)..(392): unsure at all n locations; Clone ID: LIB3159-016-Q1-K1-C4
gctgactcacacccatggcgcccaagccctttttcttcctcaagccagcggcgccctcattgctccctgcgcagcgccccttttcttgtgcctccagcagcaagaagccatcgcccctctccattttcccccacgtctcttccctctgtttttcctgtacgtgcgcaggagtatggggcctcccatggcgccctcctccctggtctcccttgcgcagggcagccatggccgagctcgccctcgcctcctgctctccatgggcgtgggtccccatcctctccctcctcccaaagtgcaggtagcagtccagcagccatggacgcccaggctgggaaacgctggaactcgcgctctctctggtttgggtggagcagcgcctntccctgcgctca

SEQ ID NO: 14284 - DNA, 287 bp, Zea mays
  Clone ID: LIB3159-016-Q1-K1-C5
cactttttcaagaaccgcctaatgtaccggactgccggcggttccatgcgcaaccttcccaagggggcagggccgcacaaaaacaacaacgcgtccgccactttccactttcttcagaaggtcaaggccggtctgcccgtcgacccgctcgtctgcgcggcagccaatactaacggcaccgtgctcaacttctgctctgccatgttcagcttaaacctcacggagcataataaacacctcaaggaaaagctcgttcccatagcgggggaccagccctcaaatgggtc

SEQ ID NO: 14285 - DNA, 264 bp, Zea mays
  Clone ID: LIB3159-016-Q1-K1-C7
gcgtccgccgttctccctccctttctgcctgaccatataggaccagccgaaccaccaatgcatatggcaccttcccacgggctgaggacctcccaataccaatacctcctcagtcatttaccacttgcttcacagggacaacgcctgactgacctactgacccaatcgtcttccctgtgaccaaaactaacggtaccgtgctcagattccgctttgccaatgtcaactacaaccttacggatcatattatacaggctaaggaaa

SEQ ID NO: 14286 - DNA, 280 bp, Zea mays
  Clone ID: LIB3159-016-Q1-K1-C8
cctgattcaagtggacaaccagacggtgaaatccttgctaccttacatgagtaagttcatgaagctgctgacctttgctctgaagatcggcgcgcatttcatcgttgggatgggagagatgatacctgacctgagcagggaggtggtgcgcctgctggactcctcggccttgtacggcacaactgcatctgccatgtccgtgggggctctgggcgcggcagcactgtatggcaagtcaaggaatggtagcacgagcgacatgggagaggatatgacagca

SEQ ID NO: 14287 - DNA, 496 bp, Zea mays
  Clone ID: LIB3159-016-Q1-K1-C9
cgtccggtccaaaggagacgttcgttacgattaaggttaatcatggcgactgtggtcctgttgagtcgatgaaggtgcagaggcaggtggttactcgaactccagttttctatcgtttggagaaaagagaaaacaatgattcatctgttgggtatattcacattacagagttcaatgcagtggccaaaaaagatttgcgctaaaacgtctacagaaatcaggcgcctcctattttgttctggatttgagggacaatcttggtggactagtgcaagctggaatcgagacagcaaagctctttctgaataaaggagacacggtcatttatactgctggccgggatcgcctagtccaaaaggcaattgttgctgaaagtggacctatgattgctactcccctcatgttgctggtgaataataggacagcaagcgccagtgaaatagttgcttcagcacttcatgacaattgcaaagctgttcttgttggcgaaaggact

SEQ ID NO: 14288 - DNA, 319 bp, Zea mays
  Clone ID: LIB3159-016-Q1-K1-D1
cttgttctccctccctctctgcctgaccagctaggatcagcggaagcagcaatggtgatggcgtcgtcgagcgggctgaggagctgcagcgccgtgggcgtgcccagcctgctggcgccgtcgtcccggtccggccgcctggcgccgttctgcgccaacgccaccacctctggccgcgtcaccatgtccgcggagtggatgcccggccagccacgccctgcccacctcgacggctcctctcccggggacttcggcttcgatccgctgggcctcgcgaccgtgccggagaacttcgagcggttcaaggagtcagaggtgt

SEQ ID NO: 14289 - DNA, 441 bp, Zea mays
  unsure (1)..(441): unsure at all n locations; Clone ID: LIB3159-016-Q1-K1-D11
cgtacggggcacgattgaggttgttgtcactgatattgttaccaccacccaaggccatgacaacctgnncganctcttttccaagggctacgaggccggtgcccgctttgccaagtggcgcgctgttctcaagattggccccaatgagccatcacagcttgccatcgacctgaacgctcatgtgtctggctcgctatgccatcatctgccaggagaatggtctggtgccaattgttgagcctgagatccttgttgatggccctcatgacattgatcgctgcgcttacgtcactgagaccgtccttgctgcctgctacaaggcgctcaacgagcaccatgtcctcctggagggtaccctcctgaagcccaacatggtgactccaggctccgactccaagaaggtgactcctgaggtgattgctgagtacaccgtccgtaccc

SEQ ID NO: 14290 - DNA, 329 bp, Zea mays
  Clone ID: LIB3159-016-Q1-K1-D2
cgcggaaccctgcccccggccgccatggagatgagcgatgcggagcggctgttcttcttcgagatggcctgcaacaactccgaggtcgcgtacgagcagaaccccaacgacgccgacaacttgacgcgatggggcggagcgctgctggagctatcacagatgcgtaacggccccgacagcctcaagctcctccaagatgcggaagccaagctggaggaggcactgcaaattgatcccaacaagtctgatgcactctggtgcttgggaaatgctcagacttctcatggattcttcactccagacactgcaatggcaaatgagttctttgc

SEQ ID NO: 14291 - DNA, 467 bp, Zea mays
  Clone ID: LIB3159-016-Q1-K1-D4
cggccgaccacgcgtccgtcgtcgcttccagccgccgccgcgtccgcttcgccaagcgcagcagccgccgcagcacagggctctctcgatctcagccatggcggaggtggagcagcaacaggacacgccgaagctcttcaaccgctggaccttcgatgatgtccaggtgaacgacatctcgctgaacgactacctcgctgtgaacgcgacgaagcacgcgatgtacctgccgcacaccgcgggacgttactccaagaagcggttccgcaaggcgcagtgcccgatcgtcgagcgcctcacaaactcgctcatgatgcacgggcgcaacaacggcaagaaggtcatggctgtccgcatcatcaagcataccctggagatcatccacctgctcaccgatgccaaccccattcaggtcgtcgtcgacgcgatcatcaacagtggaccccgtgaggatgccacccgtattg

SEQ ID NO: 14292 - DNA, 437 bp, Zea mays
  Clone ID: LIB3159-016-Q1-K1-D6
cgcgtacgggcggaaccttggccccttccgccatggatttgagcgacgcggagaggctgatcttgttggagatcttctacaagaacgacgagggctcgtacaagcaaaaccgcaacgacaccgacaacttgacgcgatggggcggagcgctgctggagctatcacagatgcgtaacggccccgacagcctcaagctcctccaagatgcggaagccaagctggaggaggcactgcaaattgatcccaacaagtctgatgcactctggtgcttgggaaatgctcagacttctcatggattcttcactccagacactgcaatggcaaatgagttctttgcgaaggcaactgaatgtttccagaatgctgctgatgtggaacctgcaaatgagctgtacaggaagtcattagacttgtcagcgaacgcacctgaactgcac

SEQ ID NO: 14293 - DNA, 456 bp, Zea mays
  unsure (1)..(456): unsure at all n locations; Clone ID: LIB3159-016-Q1-K1-D8
cccgggccgacccacgcgtacggagcaacctccttttgacaagaaatcatttgtgtcttacatcaaaaaatacatcaagaatgtcactgctgtgttggagccagagaaagcggatgagttcaaaaagggtgtcgagggtgcaaccaagtttctccttagcaagctgaaggacctccaattttttgttggtgagtccatgaaggatgatgcgtctgtggtattcgcctattacaaggatggtgccactaatccgacattcctctatttctctcatggtcttaaggagatcaagtgctaggcgtgcggcgaaattagttacccatgttgggtactatctatgtactattattatatccaaaactatagttgtcctggctgaattgaactcaaaagggtttgtttgagaaaaaantgtcccaagattggattgcttgttaaagctcaatattgttattg

SEQ ID NO: 14294 - DNA, 358 bp, Zea mays
  Clone ID: LIB3159-016-Q1-K1-E2
cggccgacccacgcgtaccggagcaaccttctttatgataagggagccctgatgttgtaacagcacgcaacgcactgaaccgcggcgactattaagagggcgcgggggcctcctaatcgtgaccgtccttgtacttcgtggagcagcagctctcgccactgcttcggccctcacgctccctgcaccttgccctcggcgctgacctccaaattacttggagcgtggacggggaggtccactagctctgcctcagactggggctctcagggcccgaggatttcgtgcgtcacgtcgcctactgggaggcgcgcaagttgctgtctaactccgacctccttacccgctcccgtattgaccc

SEQ ID NO: 14295 - DNA, 285 bp, Zea mays
  Clone ID: LIB3159-016-Q1-K1-E3
aggaacattatcctcaaacctttctcctccgcttatcgaggcaagagcagagcagctaccagagaagctctcctttgggttccgagccatggagctcgacgccgacaacctgagcgccaccgagctccgcctcggcctgcctgggaccagcagcagcagcagcgacgactggcagaagaagccgtcgccctccgtcggggccaagcgcgctatggacgacggcaccaagagcgaggcctcggggaccagcccggccgtcagagacctcgacttctaccacgacca

SEQ ID NO: 14296 - DNA, 451 bp, Zea mays
  Clone ID: LIB3159-016-Q1-K1-E6
cgggcaccacacctcttcttcttcttcctccttctcctagcacagctagcgcctgctccccggcgcctgtgatcatgtcttgcagcagcggcaagtgcgactgtggctccagctgctcctgcggcagctcatgcaactgcatgtcccctaacgtggagaccgccgccgccagcagcatcaagaccacggtcctcgccgcgccgaccaccaaggccagcgccggcggcttcgaggcggccaccgagggcggcggctgcgactgcaacacctgcaactgcggcaccagctgcggctgctcctgctgcagctgcaactgagccggtcaggcgatggcgcacgagagtcgagaggacgacgacgagtcgtataaatataatagcggcgtctaaataagatcctgtcaactgcacccgccattatcgatccatggtcgctcctgggttcatgttca

SEQ ID NO: 14297 - DNA, 445 bp, Zea mays
  Clone ID: LIB3159-016-Q1-K1-F1
gcaccatccaactggctcatccgcaagcgttcccgatggatccaatcacaaggccggcaggtccatcgttccatcggccagcagtcgcgaccgcgaagcatctccatcaggccgccgccaccttggctcggaggaatggagtcagcaggaggtgccttctgacgctgctgatgtccactgcggccatacctggcggcagcgaatcgaggaaggctctactgcaagagtatctgaagaaatcgaaggagaacaaggaaaagaacgacaaggagaggctggatgactacaacaagaggaactacagggactacttcgggctcatcgagggccaggtcaaagagaagacggaagaggagcgcacggagtcggaaaaacggatcctcgagtggctcgacaggaccaggtagtctaatgaccaggatcgaatggtcgatcatggagggcc

SEQ ID NO: 14298 - DNA, 512 bp, Zea mays
  unsure (1)..(512): unsure at all n locations; Clone ID: LIB3159-016-Q1-K1-F11
ccgggtcgagcgcgggcgtccggcagcacaaccaggacgtgaactccctgggccttgtctcggccaggaagaccgccgaggcgagcggcatcctgaagctcatgtcgtccacctacatcgtggcgctgtgccaggccgtggacctgcgccacctcgaggagaacatcaaggcgtcggtgaagaacaccgtgacccaggtggccaagaaggtgctgaccatgaacccctcgggcgagctctccagcgcccgcttcagcgagaaggagctgatcagcgccatcgaccgcgaggccgtgttcacgtacgcggaggacgcggccagcggcagcctgccgctgatgcagaagctgcgcgccgtgctggtggaccacgccctcagcagcggcgacgcggagcgggagccctccgtgttctccaagatcaccaggttcgaggaggagctccgcgcggtgctgccccangaagtggaggccgcccgcgtggcggtcgccgagggcaccgcccccgtggcg

SEQ ID NO: 14299 - DNA, 392 bp, Zea mays
  Clone ID: LIB3159-016-Q1-K1-F2
tgaagacaatttttgacttcgaagcaataaaaaagctgctgacctccccaaagtttacattctgttatgatgcactccatggtgttgcgggagcttatgccaaacacatctttgtggaagagcttggtgctgatgaaagctcactgttgaattgtgtcccgaaagaggactttggaggtggtcatccggatcctaaccttacctatgcaaaagagttggttgaacgcatgggtcttggaaagtcatcctcaaatgttgagcctcctgaatttggtgctgcagctgatggagatgctgaccgcaacatgattcttggtaaaagattctttgtgacaccgtcggactcttgtgccattatcgcagccaatgctgttcaatcaattccttacttt

SEQ ID NO: 14300 - DNA, 367 bp, Zea mays
  Clone ID: LIB3159-016-Q1-K1-F3
cgtacgcgccgaactcgcccgtgttgacgcattcgatcacgacccatgcagctagcggcagcggcgggaacatctagatagggagggaagcggccaccaccatcgtagcactggccggtctcgctatgctcagctttattggcgccaccatttggttcgtcaagaaaaagcgccggcgcattgagcccccggagacactgtctacacagcaaccagctcctccgccaccgcccaactacattccatcttcggctggatcctcactagcttcaaatgggttctactcgagatcgccagggtattctttcatgaggtacagaactgggagccgtggttttccatactccccagccgactctgggattgg

SEQ ID NO: 14301 - DNA, 437 bp, Zea mays
  Clone ID: LIB3159-016-Q1-K1-F4
cgcgtacgacgcacgcatacacagttcagagcgaggttagtatccgaaaaaagcagggatctgaacgggagggtcgtcagggccatgggtctcacctccaccgcgctcatctgcaagcacggcgaccagtaccacacacgcgtagggcgatgggcggatcaccatgcgcaagactgttggctagcccaagccagcacgcgtccggcagacactggtacggagactaccgtgtactgtacctgggcccgatgttcgagcagcccccaagctacctgaccagcgagttccccggcaactacggatgggacaccggggggttgaccgccgacccggagacttatcccaagaaccgacagctggaggtgatccactgccgctgggccatgctgggcgcgctcgattgcgtgttcccggagctgctcacccgcaacggtgtc

SEQ ID NO: 14302 - DNA, 444 bp, Zea mays
  Clone ID: LIB3159-016-Q1-K1-F5
atttttactcttttcgatccatggacaacaccgagctctttccttgttcatcttttcatgtctctggatccaatctaatcctgcacatacacatgcatatgcatgcatagaggacacgtacgtgagattcaccgtacatatacgtatagatggtggtgctatattggaggagaaagctgatgagggtgtggggggtacatatcgtgtgttactgcaatacactacacagtttgttgtatggtacgtacaacaaagactcaaagagacatcttgagctgatggaaacatatacatgtgctcatgcatgcgggaatttctttctttcttcttcttttttcttttttgcacccccttttaagaagagttgttaccgaactgtccattctgtaatttattataaattcgttaattattacaaatactggggttatataaatggctttt

SEQ ID NO: 14303 - DNA, 430 bp, Zea mays
  Clone ID: LIB3159-016-Q1-K1-F6
aagacaatttttgacttcgaagcaatatttaagctgctgacctccccaaagtttacatggtgttatgatgcactccatggggttgcgggagcttatgccaaacacatctttgtggaagagcttggtgctgatgaaagctcactgttgaattgtgtcccgaaagaggactttggaggtggtcatccggatcctaaccttacctatgcaaaagagttggttgaacgcatgggtcttggaaagtcatcctcaaatgttgagcctcctgaatttggtgctgcagctgatggagatgctgaccgcaacatgattcttggtaaaagattctttgtgacaccgtcggactctgttgccattatcgcagccaatgctgttcaatcaattccttactttgcttctggcctgaagggagttgccaggagcatgccaacat

SEQ ID NO: 14304 - DNA, 225 bp, Zea mays
  Clone ID: LIB3159-016-Q1-K1-F7
cgtccgcgaacccttggccccgtttccgccccgtattaactgccccacaacgtggcttccactcggcggcctttctaaggggttcggggcttccccaccccggggaaaattaaaccaaacggcttccccgttaacttttctttttgactggcgtgggatcaaagaatcaaaaccattcttctcctccccgcccggccagcgtgcccgcgggggcctctttttttg

SEQ ID NO: 14305 - DNA, 414 bp, Zea mays
  Clone ID: LIB3159-016-Q1-K1-G1
cggacgcgtgggcgcggcgccggcgcgtcgggtcgtgcccatcacgttgtctccactccgtcgcctctcctctcctctccgtccctgcgccacgcgggggagattaaagcgaagcgcctccccgctcacctctcctctcgtcgtgcgttggatcaaagtatcaaaccaatctcccctcgccgtccggccggcgtgcgcgcggggcctctttttttggagccttgcgccgcggcccgttcctcctgtccgaaataatccgcctcgacgtgttcgcctccccctccccctccctctctcccctcccctcgcgactcgtctcgtgcgtgactgcgtgctcgctctccttttcgctgcgctcatctcggtatctgtgccagggctcgcctttcccggccggcccgccctccttccttt

SEQ ID NO: 14306 - DNA, 488 bp, Zea mays
  Clone ID: LIB3159-016-Q1-K1-G11
tgatgattctggagcatcacaacatgaattttcaactactgagggtgccaaatcagcaaatattggttcatgtcattttgatacttactgtagttgtaaatttgtaatagagttggtagccattctgttctgatgaatctagttggaatgctggatttcaatattgatgagtttgcatgcaggctgttggtaaagttcttcctgatctgaatggcaagctcactggtatgtccttccgtgttcctactgtggatgtctcggttgttgacctcaccgtcagaatcgagaagggggcctcctatgaggatatcaagaaagctattaagtaagtgatcaacaatttattcttttaataaccactcaatttatttctaaaccaatgtctgaaggtaataaacactccttgttggattaatcgccactaccacatgttcagtgtctatgtttcactgcgtctatcttgatctatagtagttctctccatatat

SEQ ID NO: 14307 - DNA, 241 bp, Zea mays
  Clone ID: LIB3159-016-Q1-K1-G2
ggagcgagcaagcagaaagttagctagctgctagcgtggaagtgcccaaggcgagagagagagacaagcctaggacggccgcgccaggctagccagccagttgttagctcctgcggacaagccgatggttggcgcacacttacacttggacagagctctcgctcggcctgccgggaggaggcgccgcggcggccaagaaggacaccatcgacctcaagctgaagctgcccaccgccggcat

SEQ ID NO: 14308 - DNA, 393 bp, Zea mays
  unsure (1)..(393): unsure at all n locations; Clone ID: LIB3159-016-Q1-K1-G3
cgaccacgcgaacggtcaagggcgactacagttcgcngnacaagtacttctccacggaggcgaagcaggcgcgggacaccttccaagggctgggggtgtcncgcgaggaggcctgccacaacctcctcttcgacaccaccttcaacagctacggcggcctcaaggtgctgttcccgggcctgtctgccaacgtggccagcggcggcgagaagctccaccagcggcttgtggccgagatccgcggtgccgtggccgacgccgacggtaatgtcaccctcgcggcggtggataggaatgagctggccaagtcggtggtgtgggagtctctactcctggacccttccgtcatgttccataaacggcacgccaagaatgacctgttggtgaaaagcc

SEQ ID NO: 14309 - DNA, 401 bp, Zea mays
  Clone ID: LIB3159-016-Q1-K1-G4
cccgcggcaaggccgccgccgcggggcccttcgaccccctgcgcgtcctggtgacggtgaccgtcctcgggagcgccggcccgttgcgcttcatcgtcctcgagggcgacacggtcgccgcgctcatccgcggcgcgcttcgctgctacgcccgcgagggccgcatgccgctgctcggcaccgaccctgccggcttcgtcctctccaccgccaacggcggatccggcgcactcggagaagacgagaggatcagcttcaacgggtgccggaacttcctgctttggcagaaggctgcggctcagggtgccgccgccaaccacgccgggtccgatgctctgacggcaaccctgagccccggcaggaagggcagcggtggattcaaggctactgatccgagccct

SEQ ID NO: 14310 - DNA, 405 bp, Zea mays
  Clone ID: LIB3159-016-Q1-K1-G5
gtcaagggcgactacagggcgctgtacaagtacttctccacggtggcgaagcaggcgctggacaccgccgagggcctgggcctgtcgcgcgaggaggcctgccacaacctcctcttcgccaccaccttcaacagctacggcggcctcaaggtgctgttcccgggcctgctggccaacgtggccagcggcggcgagaagctccacgagcggctggtggccgagatccgcggcgccgtggccgacgccggcggcaaggtcaccctcgcggcggtggagaggatggagctggccaagtcggtggtgtgggagtcgctgcgcctggacccgcccgtcaagttccagtacgggaacgccaagaaggacctgttggtggaaagccacaacccggtgttccaggtaaggaag

SEQ ID NO: 14311 - DNA, 321 bp, Zea mays
  Clone ID: LIB3159-016-Q1-K1-G7
acgagtccaaccttgatgggaccccgcttatcaaggggggaaggaccgtggggttgggggccgcccacccgcggggggtggcaagaaccggggtgctttccaaggcgaattcattcaaggtggcttttaaggatttggaccccttttattagttgcagcatttggtggccaatctggtggcaatgctgtccaagttgggacaaaagaaattccatccaagatgagggatgggggctattaacaaaaagtgaatgaaactgtgaatggtgtgttgcaatataaactgccgaaaatggaaaccagacttgggggatcattaaa

SEQ ID NO: 14312 - DNA, 297 bp, Zea mays
  unsure (1)..(297): unsure at all n locations; Clone ID: LIB3159-016-Q1-K1-G8
naggcgcatgggctgaactcaatgaaaattttggcgctgacggagtagacagccaagagtgcaagactgatggtgctcaatgtggacagcaaaacctcaatttattgcttgctgcgacacaaccatataagatctgatctgacgttggtatgagcacttctgtttgcacccatggcgtcagctgcttgcattcataacgctgcgtacgatgaagctgtgacattaactggtgctgtcacgagagacccaatgggcactgcttgccatatggacgttggatgcatgctcacccctctc

SEQ ID NO: 14313 - DNA, 392 bp, Zea mays
  Clone ID: LIB3159-016-Q1-K1-H1
aacgagtccaagcctgacgggatcccgccatcccagggcggcaagtacgttgggttcggatccagcccaccgccgtcggctaacaggaacggcggtgctgcccagggcgatgtcatgcaggttgtctctcagggatttggacgcctttcattagttgcagcatctgctgcccagtctgctgccagtgctgtccaagttggcacaaaagaaatccaatcaaagatgagggatgggggctatgaccagaaggtgaatgaaactgtcagtgttgttgccaataaaactgcagagattggaagcaggacttgggggatcatgaaaggagttatggcgctggcctcacaaaaggtaaaggaatatgccaaggaaggagaattggttgcttgggaaaa

SEQ ID NO: 14314 - DNA, 301 bp, Zea mays
  Clone ID: LIB3159-016-Q1-K1-H10
tcctcgcccccatggtacgcggcgttctttttataaacgggctaccggccccatctattctcctttctcttcctcttcctgcctgtgatttgttaggccaactctcccaacttcccgcatgcccacaagaataatctttcctacccgattctgtagatcaatgttcataagctcgtcctcaatatctccttccgatagagctacgaccgtctcaccctctccacaaatgttctctatcatttcatcattcatacccccgtcttctccaaatctatgtacactgatctgtctttctacatcc

SEQ ID NO: 14315 - DNA, 500 bp, Zea mays
  Clone ID: LIB3159-016-Q1-K1-H11
cgtccggaggtactggtttcatgaagttttctacaacagatgcagctgatgcagcaatttctgctgccagtgttgctcctggcttaggaatttgtttaaagagcaggccacttaatgtcatgaaagcgatggacaaggagtcagctcacaaaaaggcacttgagaaggcaaagactgaggtcgaggatcgacggaacctatacttggctaaggagggtgaaatacttgctggaataccagctgcagaaggtgtgtcagatgctgacatgaataaacgtaattggttagctagaaggaaagcggagatgcttcagtctccaaaatttcatgtgtcgagaacaaggcttatcatctacaatttgcctaagactatgaccattaatgacgtaaagaagctttgcagagaagcagtcatttctcgtgctacaaaacaaaatcctgtcatccggaaggtgaatatcctgaagaatgaaaagaaaggcatacagaagcattcacgc

SEQ ID NO: 14316 - DNA, 420 bp, Zea mays
  Clone ID: LIB3159-016-Q1-K1-H2
agatgggaaagaggtttacttccgggatgtttggccatcaacagaagagatagccgaggttgtcaagtcaagtgtgcttcctgacatgttcaagagcacatatgagtccatcacccaaggaaatcctatgtggaatgagctgccagtctcaacaagcactctctatccctgggatccatcatctacatacatccatgagcctccttacttcaaggatatgacaatgactcctcctggcccgcgaccagtgaaggatgcatattgccttctgaactttggtgacagtatcacaactgaccacatctcgcctgccggaaacattcacccagacagcgcagctgcaacatatctgaaggagcgtggtgttgaaaggaaagacttcaactcatatggtagccgaagaggaaatgatgagatcat

SEQ ID NO: 14317 - DNA, 417 bp, Zea mays
  Clone ID: LIB3159-016-Q1-K1-H3
gccatgttcgtctcctccggcagcgccaacaacaacaacaacctgtcggagttcgccgtcacctaccaggacaaggacggcgacctcatgctcgtcggagacgtgccgttcgagatgttcgctagcacctgcaggaagctgaggatcatgaagagatctgaagccacaggcctgggatcggcgagacaatgaagaaggtctgacgacgaccgagggcccgacaacgttcatgtcgatctcttctttttttttctttttgccccattattttattttgttcttcttgtccgagagaccccaagccaaaaggatgagcttggtgggtggcgcatcaatctacaaagcgcatgcatatacgcggatgtgtgtgcggctttggttctgtaagacgacgactagtacctaggtcttttttag

SEQ ID NO: 14318 - DNA, 372 bp, Zea mays
  unsure (1)..(372): unsure at all n locations; Clone ID: LIB3159-016-Q1-K1-H4
cgcggagatcctcgcgttgcaccgccccggtagcaacggctacagcatcatcgtcgggcttgacgttgagtggcgcccaagcttcggcccgcaccagaacccggtggccacactgcagctctgcgtcggacacagctgcctcatcttccagctcctctacgccgactacgtccccggcgcgctggcggagttcctcggcgaccgcgggatccgcttcgtcggcgtcggcgtggaggcggacgcggagcggctcagcgacgaccacggtctggtggtggccaacgcggaggacctgcggngccgcgccgcggagcggatgaaccgcccggacctccgccaggcggngctgcgtgcgctcgtgcaagtcgtcat

SEQ ID NO: 14319 - DNA, 292 bp, Zea mays
  Clone ID: LIB3159-016-Q1-K1-H5
taccaggacacggacggtggcctcatactcatctgagacttaccgattgagatgttctttagcacctgcaggaagctgacgatcatgaagagatctgaaaccacaagcctgcgatcggcgagacaattaacaatgtgtgacgacgaccgagggcccgacaacgttcatgtcgagctcttctttttttttatttgagccccagtattttatttggttcttcttgtgcgaaagaccaccagccaaaagggtgagctttgggggtggtgcataatctacaaagcgcatgcatata

SEQ ID NO: 14320 - DNA, 341 bp, Zea mays
  Clone ID: LIB3159-016-Q1-K1-H6
ctacaaaaagcatgtgacgtattcggtgtttaagatgcacacctagaagatatcatccatgacgatgatcaggacgctgatggcctgatcgactacaactagtatgtcataacgatgcgaaaggctattaacccactacggaaaaaggggcactgccctatgtatttttgtcatacataatcttcgtaccttcattaacctgcatgctcaatggttattgcagtgacttttgctttcctatgcccactgtaggtgacgtaactacttccgagctttggtgacagcgttacaactggccgcatatgtgctggatacgacaatctcccagacaccacctctgc

SEQ ID NO: 14321 - DNA, 305 bp, Zea mays
  Clone ID: LIB3159-016-Q1-K1-H7
ccgctctcgcctctcggccttctccttgtgttgccgaacaccctcacaagagtcggcctcgggatttctcagtccagccgcagcagcccccttccctccctcctccatcaggtgttgcctcccgcagatccaagtcggaattcggtccttcgtccccaaaccaccaatccgtcctttggaatgctacagggaagtgaagtgatgggggagtgcgaggacggcaaggagtacaggtgctgggaggagctgctgccggacgcgctgggcctcatcttccgcaacctgccgctgcaggaggtgctcac

SEQ ID NO: 14322 - DNA, 377 bp, Zea mays
  Clone ID: LIB3159-016-Q1-K1-H8
cgcgtacgcgcggagatcctccgttgcagcagaggcgttgtccatggctcgccctgcacggatcgagggggacaagctgagcgtggagcagctcaccgggctcaaagagcagacggatctggaggtcaacctcctgcacgacagtctcaccatgatccgtaccgtcgccacccgacttgagaacgcctccggcgcgcttcatgacctatccctgcgcccccaatggaagaagatgctcgtgccgctcacggcgtccctctacgttaccacttcactgcacgacgcggacacggtccatatctatgtcggcaccgcttactacatctagaaaaccatggctcaagtaaaggatactgcgaacgaaaattcatttattg

SEQ ID NO: 14323 - DNA, 496 bp, Zea mays
  Clone ID: LIB3159-016-Q1-K1-H9
cgtacgaggcacgacacctcttcttcttcttcctcctccttctagcacagctagcgcctgctccccttgcggtgtgatcatgacttgcagcagcggcaagtgcgactgtggctccagctgctcctgcggcagctcatgcaactgcatgtcccctaacgtggagaccgccgccgccagcagcatcaagaccacggtcctcgccgcgccgaccaccaaggccagcgccggcggcttcgaggcggccaccgagggcggcggctgcgactgcaacacctgcaactgcggcaccagctgcggctgctcctgctgcagctgcaactgagccggtcaggcgatggcgcacgagagtcgagaggacgacgacgagtcgtataaatataatagcggcgtctaaataagatcctgtcaactgcacccgccattatcgatccatggtcgctcctggggttcatgttcatctgtaacgtgctcgcggtcatgtccgtctcgtgccgga

SEQ ID NO: 14324 - DNA, 415 bp, Zea mays
  Clone ID: LIB3159-017-Q1-K1-A1
atcgtcgagtcggggcgggcggggctaccggtgcggatgttctcgtcgggccgctctgccggtggccctaagattgcagccacgacgtgggcggaggcagtgagcgtcttcatcatggcggcgggcaacctggcgtgggacgtgttcaccacggagcacgaggtggaggccatcctcaagggcagcctcaacctcctggcggggctaggcggctttgccgtggaggccgtcgtcggcgcggctgtcaccaaggcggtcgcaaacgtcggcgccggcgtctttgcttgctctctcgccggcttcgtcgtgggcgccataaccgggctgattttcgtcggcgtcagcggcctcctcattaacctcatcatcggctcccctaagaaggtgcctgacatgaacaagctcatgttccaca

SEQ ID NO: 14325 - DNA, 373 bp, Zea mays
  Clone ID: LIB3159-017-Q1-K1-A10
ctctaagccaaagcaagttgctaggtcctttgaaccagcaactgaagcttcctcgtctcatcatcgagaccagtaagcaacatggcggctaatctcaagtgggctcctgttctagccctcgtcgtcgtcgttgctgccatggttggcaccacgagcgccggctacatcgcagtgtactggggccagaacggcaacgaaagcagcctggcggacgcctgcaactccgggctctacgcctacgtcaacatcgcgttcctcacaaccttcggcaacggacagaccccagtcctcaacctcgccggacactgcgaccccggctctggcagctgcaccggccagagcagcgacatccagacctgccagtcgctgggca

SEQ ID NO: 14326 - DNA, 399 bp, Zea mays
  Clone ID: LIB3159-017-Q1-K1-A11
cggacgcgtgggcggccattcttcaactccattttttgttgtctgttggtatgcagagctagtatagacgtctcctccaactcaagggtggtgaaagtgctgtcagcaacgtacgggtattgatctagtttgatatattccaagaaaaacaaagaccaatgcatgagaagatggacaatgtgacacagaataatctctggaaaatagatacctggaagcatcctcgtcaaacaagactattatgaagactacaaaagccgcccgcccgttcgacagcgagctataaagtgacggaagcttcctatagtacccactgagggcctgtctggaacacgatttttcccctctgttcctgcgtttttcatgcacaaataaatctgagctgatttccgtgaattt

SEQ ID NO: 14327 - DNA, 341 bp, Zea mays
  Clone ID: LIB3159-017-Q1-K1-A2
atcgacaccgaggccgactacccgttcactggccacgacgggacgtgcgatctcaaactgaaaaatacaagggttgtatccatagattcgttcgagcgtgtgcccatcaactacgagagagcgctgcagaaggccgtggcgcaccagcctgttagtgccagcattgaagcatctcggcgcgcgttccagctctacagttctggcatcttcgacgggagatgcgggacgtacctggaccacggtgtgacggtggtggggtacggcagcgagggcggcaaggactactggatcgtgaagaactcgtggggcacccagtggggcgagggccggtacgtccggat

SEQ ID NO: 14328 - DNA, 264 bp, Zea mays
  Clone ID: LIB3159-017-Q1-K1-A3
gcgtcgtgaacacaccccaccacactacccacggaatccgccacccgcacccgacaaggagatatgtcgctgggaagggaggagcgttaggaaggaggaggtggtcaccaaggagtacaccatcaacctccacaagcgcctaccggttgcacattcaataagaaggcacccaacgccatcaaggagatcaggaagtttgctcaaagccatggcaccaccgacattaggattgatgtgaactctcaagcacatctggacagcggg

SEQ ID NO: 14329 - DNA, 55 bp, Zea mays
  Clone ID: LIB3159-017-Q1-K1-A4
atcaacacaaaatcttaccacactacacacatttatatattcatacacaccctca

SEQ ID NO: 14330 - DNA, 377 bp, Zea mays
  Clone ID: LIB3159-017-Q1-K1-A8
ggcattttgtccacgtacctacctacctagaagtagaacaagagaggaggacgcctaaaattctgtcgcattgggcaccgcgtactggactggacaggcgggtcgggatccatcatccatcgtcagccagaaaattgtcgctgtccaagcagcctgggcagcttgtgtgtgactgtgtgtgctgatatcttgagctagctgtggcagaaactggaaaccctactgtgtgtgtgctgatatcttgtcatagcgagctgtgtgatgccgactggtgtagagctgtatcgctgattgcgtgaaaccgaaatgctgtggctttatttagactgatgttgtcacttccagtcatcggatcactcccagcactttgttcgttc

SEQ ID NO: 14331 - DNA, 364 bp, Zea mays
  Clone ID: LIB3159-017-Q1-K1-A9
gcgatagctcgtgcgcagtgcctccttcgcttccgccgctggtcgccactgccgcttcttcctctggcttagcctcccgctaccacacgagcagcttcctgccgccgcagcgtacgcatggcctcgtcggacggctctgccgcggccctgcccagcgctaccgtcgatgtgcccggcgccggggcccctgtcctcgttgtgggcgcgccggggctccccgaggctgacttcacgaacgcggtggagtcgtcgctgttcaagcagtggctgcggaacctgcagtcggagaagggcgtcctcacctacgggaggctgagcctcacgcgggttctcatccattgcggtgacatgttcgggaaacggg

SEQ ID NO: 14332 - DNA, 371 bp, Zea mays
  Clone ID: LIB3159-017-Q1-K1-B1
cgagggagttggcagctcagtttcagttactcaccgactttcctcttctgtttcgaagcgaacgaaactgtgcttccctccaagcgatttggacacgccaattctagatggaaacggtcgtccagactcagtggaaactgaacgtttccacagggtcttgcaaggtcaagaattggtgcactctagtattcatggtactgcatgctctcattcatcagatagccccagatgtcaaggctcttatggcaggagattctctgctgatgcgtggaactgcaagatgaatgatgtaatgagtgggcctcgacacctaaatgccactgggtttgcttaccagcccctaggcttcagtgaatctgtcaaattctcag

SEQ ID NO: 14333 - DNA, 273 bp, Zea mays
  Clone ID: LIB3159-017-Q1-K1-B10
gctgattcctttccagctcgcaccgcggttgaacagcgtttcgttgtttcctccccaacttccaaggcgcctcgatctatatccactcttcccccccttctccttccggtcctccccccgagactcttctattcatatatgcgggttggcgtccgaagcctcgtctgttctcggcttctcgtctccaagggtgcttctcccgccgcgcttggtcttgttctctccttccggaggccgcggcgcatcatggcatatatcaagccgaatgccttg

SEQ ID NO: 14334 - DNA, 313 bp, Zea mays
  Clone ID: LIB3159-017-Q1-K1-B11
ctcatctggtcgctcactcttgcagctccacccttcactcagtcttaagctcttagctctaggctggagctagccgcgccactccttcgcgtagccatcagccttctcatcgccaccaatggccactgccgaggtccagaccccgaccgtcgtgtcagccgaggaatcgccagtggtggagaccccgtcaccggtcgtcgtgccctaagagactgccccctccaaagccgatgctgaagctgaagctgatgctgctgctcctgctgatcccgaagagcttcccgcggccgagcagcatgcaacctccgagccc

SEQ ID NO: 14335 - DNA, 462 bp, Zea mays
  Clone ID: LIB3159-017-Q1-K1-B2
ggttcatctaggcctgatatgaagatcgatcgaggcttgcctagcgataacagtggtcctgataaggcaaattccaaggaattatgtccgagtaccgaggatgcggaagcagaggctgaagcagctgcttctgctgtggctgtggcagctattagcactgatgagggatctccagctgatgcaactactgcatcggctccagacaagagctttacaagcaaggatctcagtgggttaacatcaggaggggcaagaacaggtcaagctggtcaatcatccacagaagagccactcgcagttgctcttcctgcagacttatcggttgatactccatccatgtcctttgggcctcctatagccagtccacaagcatcagggccaatgctttctcaatttcatggtgcacagccatcccacttttcctgctttgatatgaactccatgttaggagggcacattttt

SEQ ID NO: 14336 - DNA, 438 bp, Zea mays
  unsure (1)..(438): unsure at all n locations; Clone ID: LIB3159-017-Q1-K1-B3
cgtgcctcccactaaaccctagatctctctctctagaatgccgacgccttcggctctcagcaagcgcggcggcgacggcggggacggcatcctggccgccctctcccgttcgcaggtggcggcgcacgggcgagaggcggcggccgtggcgaaaaagctgctgcggagcacggggaaggcggcgtggatcgcggggacaaccttcctggtgctggtggcgccgctgatcatcgagatggaccgggagcagcagctcaacgacctcgagctgcagcagcagacgcttctgggcggngccccgccgtcgccgccgaccaagtagatagatccgtgcatcgaccctttcgtccccccccccctcttcctctctagaggtatctgttactatcaagttcatcattcgagttactatcaagttcatcattccaagtaactatc

SEQ ID NO: 14337 - DNA, 117 bp, Zea mays
  Clone ID: LIB3159-017-Q1-K1-B4
gtgctatctaggcgaagcatccggccaatctagcattttcgcgcggggtctgagtgcagaccgggggggggttttgacgtaagatggcctgcacccatgccttcgtcttgtggaggt

SEQ ID NO: 14338 - DNA, 330 bp, Zea mays
  Clone ID: LIB3159-017-Q1-K1-B5
aactccagggcgacccacgcgctcggagcccaggaattctataaagtcgaccttcgcgcctacgcgcttgactataatctagcggggcgtacatccattaacggtgtcactgccatcattggttgctgtgactatttgatttctgttcacaatgccacactgcatcccaacatgagccatatttcgaccagcctcggggccctcttgagtctcctggctcacattactctacttgcgctccctgccctctatcacgcctagaaaccttgctggtgatgttactcaaggaatctcacatctccctgtgagattctctttgaccattgtgca

SEQ ID NO: 14339 - DNA, 462 bp, Zea mays
  Clone ID: LIB3159-017-Q1-K1-B6
ttcctcgccgcctcactccctctgaggtcgcagatccgtccggttagacgaagccgcccgcacgcgatggcctccggtgagctcgcctgcacctacgccgccctcatcctcagcgacgacggcatcgccatcaccgccgagaagatcgccaccatcgtgaaggcggccaacatcaaggtcgagtcctactggccggcgctcttcgctaagctcctggagaagcgcagcgttgaggatctaatcctctccgtgggatctggtggtggcgctgctccagttgctgcttccgccccagctgggggtgctgcagctgctgctgcccctgctgcagaggagaagaaggaagagcccaaggaggagtctgatgacgacatgggcttcagcctgttcgactgagaccctcgctacccagccattagcaaattcgcttatgctgtccaagacttatcttacgttatgtct

SEQ ID NO: 14340 - DNA, 455 bp, Zea mays
  Clone ID: LIB3159-017-Q1-K1-B7
cagcagtgctagttggtgaccatctttacgtggcaaatgttggagactcaagggctgttatatgaaaggctggcaaagctattgcgctctctgaagatcacaagccgaacagaagtgatgagaggaaacgaatcgagagtgctggtggaatagttatgtgggctggaacttggagggtaggtggtgtacttgcaatgtctcgggcatttggcaaccgtctcttaaaacaatttgttattgcagaccctgagattcaggaacaagaaataaatgatgagttggagtttctaattatagctagtgatgggctgtgggatgtggttccgaatgaggacgctgtttcacttgtgaagatggaggaggatcctgaggcagcagcccggaagctgacagagactgcgttctcccgtgggagcggcgataacatcacctgcatcgttgtgaagtcgagcatg

SEQ ID NO: 14341 - DNA, 254 bp, Zea mays
  Clone ID: LIB3159-017-Q1-K1-B8
gcaaaactcagttgacgaacgtggaaacgactattgatcggcctcccccgcttcctgcctgggcgagcagtcagcgcagtctggcgcgtacccatgccctcggcaacctggtgggcaacagagccaatcaacagacaacaagagatgggcgctgggctgcagtgctacctaattggccactgccttgcgtgctcacaaactacatcgtgctgatagcgcccacagctaagcgctaaccgaatcgcctgtccagg

SEQ ID NO: 14342 - DNA, 395 bp, Zea mays
  Clone ID: LIB3159-017-Q1-K1-C1
ccaaataagacctaaggattgtcataatgattgaacaacaaagtagttgacttctgtgcccgcatgggttgggtaccatggcagctgatttgctgagttgagactacctatagactacagtaacaaaaacgacctgcaagccggcaggctgcagcccacttccacaaactatggagcacgaacattggtgatggcaatatatacacactggtatgtacagcttcagcgctggagtctgaagaatcacaactcaaaaccaccattcagttgaacagataacgacggccttccaatgttattaagaggtgtttccaaggtgattaccactccagaactgcccacttgaccgttccactttgatcgtccaatagatagagcaatataagctgatggat

SEQ ID NO: 14343 - DNA, 441 bp, Zea mays
  unsure (1)..(441): unsure at all n locations; Clone ID: LIB3159-017-Q1-K1-C11
gtgaagcgggagcagcagcgaaagccagcgggtgcatggcgcccttcatgcccccgctgccaccagcgagtaaccgtgctgctgtgaagcgggagcagcagcgaaggccagcgggtggtggtgaccgtggcggggacaggttcgagacagtgtctgagcagggcggcaggggccatgacaacactggaaactctggtgcagatggagccagaccccagcctggagacaggtctggtagaagcgcccttcaagacgacggcagcgagagcgaagaggagacggctcccagacgatcaaggaaacgatagagggattctgagattctattcatactggacatggtgaaaacagatcatctcttatttttgtaactgagattagaactaaggtagtgagagagaaaaaatgtggtgggcagngacattgttagttgaaaatttt

SEQ ID NO: 14344 - DNA, 313 bp, Zea mays
  Clone ID: LIB3159-017-Q1-K1-C2
gtgctctgcgtcgcgggcgccaccgtcatcacgctcttcaagggccccgccgtcttcggcccggcgccctccgtggccgcagccgtgcccgtgcccatgcccgcgccgggtggcggcaacagcagcaacaacaacaacaagagctgggcgctggggtgcgtctacctcatgggccactgcctgtcgtggtccggctggctcgtgctgcaggcgcccgtgctcaagcgctacccggcgcgcctgtccgtcacctcctacacctgcttcttcggcctcctccagttcctcgccgttgccgccgtcttcgagcgcg

SEQ ID NO: 14345 - DNA, 389 bp, Zea mays
  Clone ID: LIB3159-017-Q1-K1-C3
agaaggtttagtgactttctgaatctatcttctgatcttaagagcgcatttcccagaaaagatgcgcggtcggctcctccgaagcatgctttcttaataataaatccaagcaggttgcttctagaagagagaaggcatgcattgtaggagcggatgcaaaagttactttctgacattgacttgtcaagaagtgctcctgttgctgctttttttgagcttgaagctgctgcacgttcatatttgcaagaacggaatgggcgttcttctgaagtatgttcttctacaaaaagcagtactgcctcttctacacatactgatggacctgcttctggttctcttgctgagtccaatcaaataaatcaaactcttactcgggcagcagtctgaca

SEQ ID NO: 14346 - DNA, 250 bp, Zea mays
  Clone ID: LIB3159-017-Q1-K1-C4
caagtatctgatggaggcagatatcaatgcaaacaacctgagggagttctgcttaagtcttctggatggcacgctcccgccataccacaaatcataaccattgcctcaagagaagggacttattgaaaaggttgttggtcgtacatttgattcttctgtgctggaaagtcatcaaaacgtcttccttgaggttcatacaccttggtgtgttgactgttaatcgataagtataaatgttgagaagttggcg

SEQ ID NO: 14347 - DNA, 292 bp, Zea mays
  Clone ID: LIB3159-017-Q1-K1-C6
ctcaactcccatcttcccactggatattctctctgagagacctccagagaagaagtttgaatgggctaagaggcttgtgatgaaatacggctcacttgtgtctgttgtctcttttgctggactgtttatctaccttgtaccgagcccgtcgaagagcatctctaatgcaagcatgactagacgctgatctacttatacgtctcaattgaccgtgtatctagcgcttttgcctgcacgaactcttgatcttttgagctgtgcgaaagcttctaagtctacatttactcaccac

SEQ ID NO: 14348 - DNA, 256 bp, Zea mays
  Clone ID: LIB3159-017-Q1-K1-C7
atgtcacttgctggcacaagaaaaatgtcttttttcgctttccaccttctcctacaccctggtgggctctttgttttgaatcagcatcacctaatacttctctcgaaaatacacattctatgttgtctatctctaatatttttaaattttatgtcctattacagtttcacaacctctccatataaactggattctattgaaccttatattatcaatataacagtttaacttcaattgttttagcaccatcaatatt

SEQ ID NO: 14349 - DNA, 438 bp, Zea mays
  Clone ID: LIB3159-017-Q1-K1-C8
gcggcggcggcggcggcagagacaggccgcggtcgccgagcggcgtgggcagcgtcatccagggggcacgtgaacttctatcgcaactatggtaagactttcaagaagccaacgcggccttatgagaaggagcgccttgatgctgagttgaaattagtgggagaatatggcctgatgtgcaagcgtgagctgaggcgtgtgcagtatgccctcagccgcatccgaaatgctgcaagggagctgctcacccttgatgagaagaacccacgtcgtatctttgacggcgaggcactactgcgccgcatgaaccgctatggtcttctcggtgagggccagaacaagcttgactatgtgcttgcactcaccgttagagaactttctgcaaagccgacttcagaccattgtcttcaagaatggcatggctaagtgcattcatca

SEQ ID NO: 14350 - DNA, 462 bp, Zea mays
  unsure (1)..(462): unsure at all n locations; Clone ID: LIB3159-017-Q1-K1-D1
ggagactgaacgcgcagtgagctgctgcttcaaccgtcaccactgcaaccagatgccatgccagcagcataatggtgaactgcacaggattgcagaagtcagaatcctgtgggcagccatggatcctgaaggacggttgtttcagtttgctgcatgacttgaaacagatcataccgtgatcgccagcgaccggcaccatgtggcgcattgatctgcggtgtaggagcacctggtgtagcctgcacccccactcaagccctcccgagattccaaagattgcatgtcctcgtgttcactacacgatcagctgacaaaatttagataatggttgccgatttgaccgcccggcccntcgtgttagaaagggtacaagctcacttggattgccttttaattttgcatctttgcaagctttctggaaactttgcaggttaatgggttcatttttaaaaaaaaaatgga

SEQ ID NO: 14351 - DNA, 379 bp, Zea mays
  unsure (1)..(379): unsure at all n locations; Clone ID: LIB3159-017-Q1-K1-D10
gggcaaagctacagccacgtgcaaggcacgccgcgtaggggttcttcttcctcggctcctcgcgccgcactacgccgcatcgcgtcctcgcttggtagatatagggaagggattcggcgggtggtggtggcggcggcggcgagtgcgaaccattggaggaggcacaagaccctcacgggttttctagtagtagatactagatagtgataaccgattttctcctctagaatcccactcccactcgcgcacaattacgcactcaaagcccggcctcccccaccactagtccaccaccgggaaactttcccccgatctgtcttctcgccgttccgtcggcatgcacgacattggcctctccgcccgcgcggncggcgcgacg

SEQ ID NO: 14352 - DNA, 252 bp, Zea mays
  Clone ID: LIB3159-017-Q1-K1-D11
cgctttgtttacaaataattccctcatagccacctttcggcgtcgccgtcgccgctcatcttgccgagaggtgatgggaccgatgaactcgcctagttctaatatagataatcgcttttcacagcctgaggtctgctgtgtaaggtggtgttgatggagataagtttaaaatctgttccacatatcacgcgtgcacactcgctaatcataggttccacacatatctttgatgcttcgaatattttgtactaa

SEQ ID NO: 14353 - DNA, 408 bp, Zea mays
  Clone ID: LIB3159-017-Q1-K1-D2
ctggtggtggcgctgctccagttgctgcttccgccccagctgggggtgctgcagctgctgctgcccctgctgcagaggagaagaaggaagagcccaaggaggagtctgatgacgacatgggcttcagcctgttcgactgagaccctcgctacccagccattagcaaattcgcttatgctgtccaagacttatcttacgttatgtctgtaggcttttgttattacaagtactcaagttttgagtttttgagatgtggctatgacaatgtgatgaagaaccctaaaccatcgtattagagtgaaacttgtttctatatagagttccaagtttcttgaacctcaaacttgctctggttgatgctctgatgttttcagtcggtgctttttaatcgaagtcaaccgattttcg

SEQ ID NO: 14354 - DNA, 404 bp, Zea mays
  Clone ID: LIB3159-017-Q1-K1-D3
aaagtagcaaatgcaagccgtgtgcccataaattctgcaaggcatgtatatcacgctttaaagactgcccactatgtggtgctgatatagagggtattgagcctgatgcggaacttcaagctcttgttgaccgcttcattgatggtcatgccagaatcaagcgatcacatgctgcaggggatgtggaagcagcagatggcaagaacaaagtcatatatgaggatgtttccatggagagaggggcttttctggtgcagcaagctatgagggcttttcgtgcccgaaacattgaaagtgcaaagtcaaggctcactatgtgtgcagacgacatcagggaggagttaaaatcttcagaagataacttagacctatgttcacagcttggagctgtgttagggaaatgc

SEQ ID NO: 14355 - DNA, 277 bp, Zea mays
  Clone ID: LIB3159-017-Q1-K1-D7
aaagttgcaaatgcatagccgtgtgcccataaattctgcaaggcatgtatatcacgctttaaagacgccgggctatgtagtgctgatatacacgctattgatcctgattctgaactatcaagctcttgctgaccgctttattgaaggtcatgccaaactcaagcgaacacatgctagatgagatttggaatcatcacatggcaagaacaaagacatatatcatgatctttacatggaaagaggggcttttctgtttcaccaagtctatatggctttt

SEQ ID NO: 14356 - DNA, 457 bp, Zea mays
  Clone ID: LIB3159-017-Q1-K1-D8
cggacactgcgaccccggctctggcagctgcaccggccagagcagcgacatccagacctgccagtcgctgggcatcaaggtgctcctctccatcggcggcgccagcggcagctacggcctctcctccaccgacgacgccaacagcgtggccgactacctgtgggacaacttcctgggcggcagcggctcgtcccgcccgctcggcgccgccgtgctcgacggcatcgacttcgacatcgagaacggccagtcggcgcactacgatgacctggcgaacgcgctcaagggcaaggggagcgtgctgctgacggcggcgccgcagtgcccctacccggacgcgtcgctggggccggcgctgcagacgggccagttcgacaacgtgtggatacagttctacaacaccccgggtgcgcgtacgccaacgggacgacaccaacctgtgacgcatgggacacgt

SEQ ID NO: 14357 - DNA, 264 bp, Zea mays
  Clone ID: LIB3159-017-Q1-K1-E1
cagcaaagtgatcagtgtgatcgatcacacactgtcatggccgtcatgggcaaggaggaggaggagcagcagcatcttcacaaggaggaggaggtggtccaaggagatgttcgagtcgttgtccatcatgagacggttgtggacgagtaggccgattcggcgctggtgcgcaagatctccggcctgaccgacgccatcggcagtcttgtctacatgaacccgccatctgaggtgaacgcgctcttcatcgaccttttcacagtc

SEQ ID NO: 14358 - DNA, 280 bp, Zea mays
  Clone ID: LIB3159-017-Q1-K1-E10
tcccgtagtaagccggcacgatcctgctcgccctctgccacaccaacgacctgtgcaaccagtgcggggggtggacgatcacgtggcagcggaagcagccgctacaccactgccgtcacgacgatcctctccgggatctaggcctccgtggaccccaccacgcatttggtgtactcggagagccctatacagccgcttcctggccgacaagtactacttcaccatctggttggtcagttagccgccatacgccgagaccttctgctacattcctgtacct

SEQ ID NO: 14359 - DNA, 212 bp, Zea mays
  Clone ID: LIB3159-017-Q1-K1-E12
catcaatgagaagacccgcattgctctcctgttgaaggtgaaccaaatcgggtctgtgaccgaggagataggagctgtcatgaagtgcaagcgcgcctgatggggagtgatggcaagccactgtagtggcgagactgatgacacctgcattgttaacctctcagttgggctgtctacggacgaaacccacaggtccgcttgatctagatcgc

SEQ ID NO: 14360 - DNA, 308 bp, Zea mays
  Clone ID: LIB3159-017-Q1-K1-E2
aagacaatgctggagtgattgtgaacccaaagggagagatgaaaggttctgccatcactgggcccatcggaaaggagtgcgctgatctctggcccaggattgctagcgcggcaaatgcgatcgtctaaaggaagcagtttgtcgaagtttcatttaaaatggggacttgagaagggagttcttagttagacgagcttttgattgccctgaatatgtttccccggctaatgcttgtgctgctggaccgtttcctgatagctttgctttgatgacatcctccccgttatcgataaagttgcgtagcctgt

SEQ ID NO: 14361 - DNA, 291 bp, Zea mays
  Clone ID: LIB3159-017-Q1-K1-E4
gcggcacgcgacgcgggagggcgaacagcagctgtgcggcgacatagttaggccagcgccagaagcggcagccgaagaggggcagcagacgctgaccgccgagagtcccggccaccatggacaccttcttactatcgcacgggtcgcccacgctctacatcggcgacaatatcccggcgcggcacttctttaagtcgtggatgctctcgaatgtcgcggacgaccaaccatcgcgcgccatcctaatcgacttgggacactgtgagacggtcactccggcggtcaacgtca

SEQ ID NO: 14362 - DNA, 471 bp, Zea mays
  unsure (1)..(471): unsure at all n locations; Clone ID: LIB3159-017-Q1-K1-E5
gccgaagaagaggagaagcgaagcaagcaggcttcgagaacaagactgcagggggagggggaggagcaagcgaaaggggaactagagcaagatgggcggcgcactgctgcttgcgctcctcctcgtctctgctgctgccgcccctcaggtacttggagttggcaatggagacaatcacatgagaatcatccaggaggacatcatcgagacagtcaacaaccatcccagtgctgggtggacagcctcacgtaatccttacttttcaaactataccattgcgcaatttaagcacatacttggagtgaaaccagcaccacagaatgcactaagcaatgtttctgtcaaaacttattcaagatcactggaacttccaaaagagtttgacgctagatctgcatggtcccgttgcagcacaattgtgaacatacttgatcaaggtcactgtggctcttgtcgggctttnggtgctgt

SEQ ID NO: 14363 - DNA, 440 bp, Zea mays
  Clone ID: LIB3159-017-Q1-K1-E6
ggcagatgtgaggcggacaacattctgctcgaaatggacagaattctgaggccagagggcacggtcatcatcagagatgacgtggacatgttagtgaagataaagagcatcacggacgggatgagatggaatagccagatcgtggatcacgaagatggtccgctcgtccgggagaagctcctccttgctgtgaagacatactggactctggacgacagcaaacaatagcaataacgtggaatagagagttagaatgattattgacgtgatcggcaaatcttgcgactgccttaccgtttgccctgtgaatctggtggactttgggttccattttctttttgggtattcattggggggagatagttcacataatggagatataatctccttggtaagatataagactgaacccagcacagattttgacataaaaaacatac

SEQ ID NO: 14364 - DNA, 435 bp, Zea mays
  unsure (1)..(435): unsure at all n locations; Clone ID: LIB3159-017-Q1-K1-E7
cccctcccttgccgtccacttcttcctccaccacagtcatcagtggcgttatcctcttcgttctcgcctccctggttgttgttggctgggtgttggcgagctgggagtagagaccgagaagtggagcggccatgaagatccagtgcgacgcgtgcgagggcgcggctgccacggtggtgtgctgcgccgacgaggccgcgctgtgcgcgcgctgcgacgtcgagatccacgccgccaacaagctcgcgagcaagcaccagcgcctnccgctcgaggcgctctccgccaagctcccgcgctgcgacgtctgccaggagaaagcggcgttcatcttctgcgtggaggaccgggcgctcttctgccaggactgcgacgagcccatccacgtcccgggcacgctctccgggaaccaccagcgctacctggccaccggca

SEQ ID NO: 14365 - DNA, 460 bp, Zea mays
  Clone ID: LIB3159-017-Q1-K1-E8
ctgagctgaccaagatctgtgatggcatcctcaagctgcttgagacccatcttgtgccgtcttgcactgcccccgagtccaaggtcttctatctcaagatgaagggtgattactacagataccttgctgagttcaagactggagctgagagaaaggacgccgctgagaacacgatggtggcatacaaggctgcccaggacattgctctggctgagcttgctccaactcaccctattaggcttggactggcacttaacttctcagtgttctactatgagattctgaactcacctgatcgcgcctgcagtcttgcaaagcaggcttttgacgaggccatctcggaactggacaccctgagcgaggagtcctacaaggacagcactttgatcatgcagctccttcgtgataacttgaccctatggacctctgacatctcggaggaccctgctgaagagattag

SEQ ID NO: 14366 - DNA, 469 bp, Zea mays
  Clone ID: LIB3159-017-Q1-K1-E9
gctgctgctgctgctggacgcgcgtgcgtgacctccgaccgacttgcaactgcaaagggtgtcgctgccgacgtgggcggagttcgagctcgggcgggcgccggtctactggaagaccagcagcggcctcccgccctcgccgggcgaggggctgaccctgttctacaacccggcggcgacgaagatggccccgaacgaggtgttcggcgtggcgttcaacggcggcttcaaccagcccatcatgtgcggcggagagccgaggcagatgacgctgcaggagcggggcaaagccgacccgcccatctacaccatcaggatacgcgtgccgcagcacgccgtaagcttgatcttctccttcaccaacggggccgagtgggacgggccgtacacgctcaagttcatggtccccaagccatggcagaacaagccgctgagcttcttcaacgagggcctggcggacgaactcaac

SEQ ID NO: 14367 - DNA, 459 bp, Zea mays
  Clone ID: LIB3159-017-Q1-K1-F1
cccacgcgtccgccctagcgacgccgagctactaaaggcacaagccgacatatggcggctcagcctctcctacctcacgcccctgtcactgaggtgcgccgtggagcttggcatccctacggcgatctaccgccatggcggggctgcctcagccgctgagctggtcacggcgctgtctctcccctccactaagctgccgttcctccgccgcctgctgcggctcctcgccgcgtcgggcgtgttcaccgtcgacaagcagagctcggaggaggagcggtaccgcatcagccccgtgtcctacctcctggtggacggcatccctcacgaggaccacatgaaccacaccgctctggtgctcacctgcacctcgacgcgctacatcgaagcggggatagggctggcggagtggttcaagagggacgtggtcacgtcaccgttcgaggagctgcacggggcgac

SEQ ID NO: 14368 - DNA, 441 bp, Zea mays
  Clone ID: LIB3159-017-Q1-K1-F2
ctgtcctcgcgtctcccttcccagatccatcgactcgctcgggccgcccctcccgtcgtccccgttcgaaggtgcggcagccggcaggcgagcgatttgattcgacatgaatcccgagtacgactaccttttcaaacttctgcttattggtgattctggtgttgggaaatcatgcttgcttctcagatttgcagacgattcttatttggacagctatatcagcacaattggggttgatttcaaaattcgcacagtggagcaagatgggaagaccataaaacttcaaatttgggatactgctgggcaagagcgcttcaggacaatcactagcagctactaccgcggagctcatggaatcattattgtatatgacgtgacagaccaagaaagcttcaataatgtgaagcaatggttgaacgagatagaccgttatgcaagtga

SEQ ID NO: 14369 - DNA, 335 bp, Zea mays
  Clone ID: LIB3159-017-Q1-K1-F3
gggtgctcgccgtctctgagcggcgccatcagggtgaacccgtggaacatcgaggccgtggctgacgccatggagaccgcccttgtgctgcctgagaacgagaagaggctgcgccacgataagcacttccgctacgtgagcacccacgacgtcgggtactgggctaacagcttgctcctggaccttgagaggacctgcaagtatcattctcagaagaagtgctggggcattggcttcggcctgcagttcatagtggtctcgctcgacctgaccttcaagaagctgtgcttggagaacatccttatggcatatcggagagccaagacacgggcaat

SEQ ID NO: 14370 - DNA, 265 bp, Zea mays
  unsure (1)..(265): unsure at all n locations; Clone ID: LIB3159-017-Q1-K1-F4
actgctcaatgatgggccatggctactaacagtctctttcattgccatcattggaagagagatgacagtgtcagctgtgagagagtgggctgcatcttanaatagcaaagttcttgaggctgatgcagttaacaatttagggaagtggaagacagctacgcatatgacagcattgactctgcttatagttagcagagacccaagtttacctgcgcatggcgctctagttgccgctgtgttgctctactttacatctgcacaagac

SEQ ID NO: 14371 - DNA, 186 bp, Zea mays
  Clone ID: LIB3159-017-Q1-K1-F5
ccgccaacccgcgcgacgtgcaccatcactggttcaaggacatgcgcttcatcacccaagtcaaggactaggagggcaaccctgctttcgccctgttcaacaagtgccactggactcgtcattaagcactcctttggccagtcccaccctttgaagctggtgccactaaacccgtagtaccatgac

SEQ ID NO: 14372 - DNA, 229 bp, Zea mays
  Clone ID: LIB3159-017-Q1-K1-F6
ctttccagatccatcgactctttcgggccgcccctcccgtcgttcccgtggggaggggctgcagcccgcaggcgaaccattttattccacatgaatcccgagtaccactaccttttcaaacttctgcttattggtgattctggtggtgggaaatcatgcttgcttcttagatttgcagacgattcttatttggacagctatatcaacacaattggggttgatttcaaaa

SEQ ID NO: 14373 - DNA, 463 bp, Zea mays
  Clone ID: LIB3159-017-Q1-K1-F7
ggcccgggctccgggaagcaccacttcgacggccacagccaggtcaaggacttcatccagacgctgctcctctacggcggctacaacgagctcgccgacatcctcgtcaacctcacctccctcgccaccgagatgggccgcctcgtctccgagggctacgtcctcaccgtgctcgcccccaacgacgaggccatggcgcgcctcaccacggaccagctcagcgagcccggctcgcccgagaacatcctctactaccacatgatccccgagtaccagaccgaggagtccatgtacaacgccgtgcgccgcttcggcaaggtgcgctacgacacgctgcgcctgccgcacaaggtcgtggcgcgggaggccgacggctccgtcaagttcggccagggcgagggctccgcctacctcttcgacccggacatctacaccgacgggaggatcttcgtgcagggcatcg

SEQ ID NO: 14374 - DNA, 397 bp, Zea mays
  Clone ID: LIB3159-017-Q1-K1-G2
gcttgatatccgctacccaacactgccagtggtagagctacaccgtcaccatgcccctgtcaatgccattgcgtgggcacctcactcttcttgccacatctgcacagctggggatgacatgcaggcactgatatgggatttgtcgtctatgggaactggtagcaatggcagtggcaatgggaatggtaacacagccgctggagcagcagcagagggcggtcttgatcccattttggcatatacagcaggggcagagattgagcagttgcagtggtcggcgacccagcctgactgggttgcaatcgcattcgccaataagcttcagattctcagggtctgatttcctagttccacccttgttcagtgagggagaaaaaatgctaaacttggataatga

SEQ ID NO: 14375 - DNA, 383 bp, Zea mays
  Clone ID: LIB3159-017-Q1-K1-G3
caggacaaggaagggatcccgccggaccagcagcggctgatctttgccgggaagcagctggaggatggccgcacccttgcggactataacatccaaaaggagtctacgctccacctcgtgctcaggctccgcggtggcatcattgagccctcgctgcaggcgctcgctcgcaagtacaaccaggacaagatgatctgccgcaaatgctatgcacggctgcaccctagggctgtcaactgccgcaagaagaagtgtggtcacagcaaccagctgagggccaagaagaagatcaagaactgaggtgttgctgctagtcagtttcatggacaatgttgtttggttgttgaaccgtgtttgtttacgaactgtatttttgtttggtt

SEQ ID NO: 14376 - DNA, 388 bp, Zea mays
  Clone ID: LIB3159-017-Q1-K1-G4
gccagcgccatccacccgctcccctccgcgcccggccgcaccgctcccctccgctcggccttgggcggcgccacagccgcaagcgactggcgtcatatcccatcctgatctctccttccttcttcagtgcagctgcaggccagctgcactccacccgcctcactcccgcctccgatcctctgcttactcgccacccgtagatggccaccttctccggcttctctgtattctcttctgctgtcttcttcaattgtctttcttttcatcatttttttttaggttctaatattaaatctatctttgtttgttatttctctttcttcctcttatatttttagaattatttttgttcttttttttttctaattttcaacccctttttctaaat

SEQ ID NO: 14377 - DNA, 394 bp, Zea mays
  Clone ID: LIB3159-017-Q1-K1-G5
gtatgcaccagttcatcagcatttctttgttgcccgtatggacatggctgttgattgcaaacctaatgaagctcataaccaggtggttgaggttaatgttaaagtggaaagtgcaggcacacataatgtgcataataatgctttctatgctgaagagaagttgctcaaatctgagttgcaagcaatgcgtgattgcgacccttcatctgcccgccactggattgtacgcaacacacgaactgtgaatcggacggggcagccaactggctacaggctcgtacctggttcgaactgcctgcctttggctctgcctgaggcgaaatttctgaggagggctgggttcttgaagcacaacctctgggtcactcaatacaagcgtggcgaagatgttcct

SEQ ID NO: 14378 - DNA, 404 bp, Zea mays
  Clone ID: LIB3159-017-Q1-K1-G6
gcttgatatccgctacccaacactgccagtggtagagctacaccgtcaccatgcccctgtgaaggcgcattgcgtgggcacctcactcttcttgccacatctgcacagctggggatgacatgcaggcactgatatgggatttgtcgtctatgggaactggtagcaatggcagtggcaatgggaatggtaacacagccgatggagcatcagcagagggcggtcttgatcccatttcggcatatacagcaggggcagagattgagcatttgcagtggtcggcgacccatcctgactgggttgcaatcgcattcgccaatgagctacagattctgagggactgattttcttattccacccttgtttagtgaggagtaaaaaatgctaaacttggataatgagctgat

SEQ ID NO: 14379 - DNA, 400 bp, Zea mays
  Clone ID: LIB3159-017-Q1-K1-G7
gacccacgcgttcgctatggttgaagcaaaacacggttaggaagtccttattgcccttgagatggctgcctatttctgggggggctaccactctcctaagaagctcatcggttgctttttagcctaaaaaaccttccaagtcagaccgaacaaaaagtgaaaaacttcatccagtgattgcttggtcctttcgctctatcaagtgtgtaatgtgtcttcgaaagttttgaaagcctactgctgcttgtgcatatacttatatcactttcaatgcaagcctatcgttgtgttcatttttaatgcttgacgagaaacattcttgttttttatttaatatgtcaccctttttgttgttgttgttgacatttaatacagacattttctttttcttttttgtgtt

SEQ ID NO: 14380 - DNA, 163 bp, Zea mays
  Clone ID: LIB3159-017-Q1-K1-G8
cttacctttcaagagatctctccaaacaaggacaccgttttccattactagtcacacattgcgttcacaatgccttgcctgtaccgcattttccaccgtatttatgtgttttacccctatttctacatcttgtcttctggcgcggacctttccatttattttt

SEQ ID NO: 14381 - DNA, 310 bp, Zea mays
  Clone ID: LIB3159-017-Q1-K1-G9
cacgcgttcgctcggagccctactacaccgtctagtgggtcgcctcgccgttcggagttcagcaaggacgccgtcaagaacggggtgccactcctcgacgagggccgcacctacttcttctcgggcaactacgacggcgagcagtgcgagagcggtcagcgcttcgccgtcgacttggcccacggtcagggcctgccgcctgacctcaagccgtccgtcgccgacgcgccggcgcccttctccgcggggcccgccgactgatccgtcgcgcttgacttcatccaccccaagaacgttaccactccgagcg

SEQ ID NO: 14382 - DNA, 381 bp, Zea mays
  Clone ID: LIB3159-017-Q1-K1-H1
cgatggtggaggcaaaacgcggtgaggaggtcctgaaggccgaggagatggctgccaagtaccgggccaccggccacgctcctaagaagctcatcggttgcttcggagcctaagaaaccttccaagtcagaccgagcagaaagtgaaaaacgtcagccagtgattgcttggtcctctcgctctatcaagtgtgtagtgtgtcttcgaaagtttgtaaagcctactgctgctgctgtatatactgatatcgcttccaaggcaggcgtttggtggtgtacatgttgaatgcttgacgagaaacattcttgtgtgtagttaagaggtcacgctgttgttgttggtggtgacattcaagcagacatttttgtttcttcctgtgtt

SEQ ID NO: 14383 - DNA, 195 bp, Zea mays
  Clone ID: LIB3159-017-Q1-K1-H10
tcgctcttctcctcctcctcgaagctccgatccgatcccccaatgtctgacagcagtccaggtcccggcgcctactactccggccctcccgccgcgcctccgtccgaatcttatcccgttgactgctgtcaggtcaacgccgatgatcctggctactacttcttcgtccctgctgcgaaatctggctccttctgt

SEQ ID NO: 14384 - DNA, 374 bp, Zea mays
  Clone ID: LIB3159-017-Q1-K1-H11
ccgacatcgtcccttcgtccccacgagcaaccgataatccgccggcgttgagatgttggtttatcaggatctcctatctggcgacgagctcctgtcggattcattcacctacaaggagctcgagaacggcgtcctgtgggaggtcgagggaaagtgggtcacccaaggtcctgttgatgtggacattggtgccaatccatccgccgagggtggtgaggacgaaagcgttgatgacacagctgtgaaggtggttgatattgttgacacattccgtctacaggagcaacctccttttgacaagaaatcatttgtgtcttacatcaaaaaatacatcaagaatctcactgctgtgttggagccagagaaagcggatg

SEQ ID NO: 14385 - DNA, 414 bp, Zea mays
  Clone ID: LIB3159-017-Q1-K1-H2
ggatcactaccacttctcgtgccagttcaccactgacttgattgcaatgaaccatgccgacttcatcatcaccagtaccttccaagagatcgccggaaacaaggacaccgtcggccagtacgagtcacacatggcgttcacaatgcctggcctgtaccgcgttgtccacggcattgatgtgttcgaccccaagttcaacatcgtgtctcctggcgcggacctgtccatctacttcccgtacaccgagtcgcacaagaggctgacctcccttcacccggagattgaggagctcctgtacagccaaaccgagaacacggagcacaagttcgttctgaacgacaggaacaagccaatcatcttctccatggctcgtctcgaccgtgtgaagaacttgactgggctggtggagctgta

SEQ ID NO: 14386 - DNA, 480 bp, Zea mays
  Clone ID: LIB3159-017-Q1-K1-H3
ggcctttcagggatattattcgcgggagcccagatgtgaaatgggagagcatcaaaggactggaaaatgcaaaacgccttctaaaagaggctgttgtcatgcccataaagtacccaaaatacttcactggtctcctttctccatggaaaggcatcttactttttggccccccagggacaggaaagacaatgctggcaaaagcggtcgctactgagtgcaaaaccaccttcttcaacatttcagcatcatcaattgtcagcaaatggcgtggagattcagagaagcttgtcaaagttctgtttgagcttgctaggcatcatgcaccatccacaatattccttgatgaaatagatgctatcatcagccagcgtggtgaagctcgcagtgagcatgaagctagtcgtcgcttgaagactgagctacttattcagatggatggtttgacaaagacaaacgactttgtatttgtacttgcagcta

SEQ ID NO: 14387 - DNA, 307 bp, Zea mays
  Clone ID: LIB3159-017-Q1-K1-H6
agaagacaagtgcttctctgaaatacacggtactgaacccaaaaggacgcatctggacaatggttgcaggtggtggtgctagagtatatatacgcacacactgttggtgatttcagacgagttacacatggaggtcacaatgcctggcctgtaccgcgttgtacacgggattaatttgttcgaccccaaattcaacattttgtcttctggcgcggacctgttcattttcttaccgtacaccgagtcgtacaagaagcttgacctcccttcacccggagattgatgagcttcttttcagtcaaaccga

SEQ ID NO: 14388 - DNA, 340 bp, Zea mays
  unsure (1)..(340): unsure at all n locations; Clone ID: LIB3159-017-Q1-K1-H7
ggaggatcaccctcaaggactgcgcaaggttcattcagatatgctgcctgattttcttaaaaaagaaatatcgcatctggaaagagcttcagcaaatacccagatatttttcggcgagcctgatgctcagacccacccgttgcattcggaggtctttgtcaggttttagcttgaaatgagcaaaagctgttgtagcccaattcctgctcatatagatttagatttctcgttgttagataacggacatggggaaaaaagtatctgcaaggcatacagagtttgatatatgtttcctcttttgcaattcatattactaaagaagtcctgcatagcnagttgg

SEQ ID NO: 14389 - DNA, 414 bp, Zea mays
  Clone ID: LIB3159-017-Q1-K1-H8
cccaaaccctagccgccgccgccgccgccgacgtcatggtcgccgacaaccgccccctcgtctgcgtgaaggccctagagggcgacatggtaaccgacgcccccggcatcgccttaccgcccgtcttcggggcgccgatccgccccgacgtggtcaggttcacccacaagctgctgtcctgcaacaagcgccagccctacgcagtctcccgccgcgccggccaccagacgtcggccgagtcctggggtaccggccgcgccgtgtctcgtatcccccgcgtccccggcggcggcacccaccgcgccggccaaggagcgttcggcaacatgtgccgcggcgggcgcatgttcgcgcccaccaagatctggcgcaagtggcaccgccgagtcaacattaacctccgccgcgttgtcg

SEQ ID NO: 14390 - DNA, 357 bp, Zea mays
  Clone ID: LIB3159-018-Q1-K1-A1
caaccatgtagacaaggtgagaaaaatcagtctgcttgcagcgatggatctaaatgcgtagatgagccaaattgctgcttgacaaaggacactgttaggacaacaaatttaaccagttcagacagcttttcgtgtctaagtgagggagatagagacagcagcatgagtagcatgacctcactgagtgctcagaatgtagaatcttcatctacatctgattcagatgagtattcagacaggaacgatagcagcccatgcgatccaccagtgaagaatgtttctcgttcattacttgagatgtgtgcaggaaatggtttcagggagtaccaaccgaaaggcttgaaccctcctaatggc

SEQ ID NO: 14391 - DNA, 259 bp, Zea mays
  Clone ID: LIB3159-018-Q1-K1-A2
gaaccttgctgactaagagtgatacagcaacctggtcgcaacgtatgacctaaacgcgtaggtaggggagtattgctggttgacaaaagacactgttcggacaacaaattaaaccataccagactgctgtgagcgactacccgatggagatagatacagatccttgagtcccatgtccctactgtcagctcactaagatgaatcgtcatatacatctagcttcatacaaatagtcagacatgacctattgctgcccacg

SEQ ID NO: 14392 - DNA, 339 bp, Zea mays
  Clone ID: LIB3159-018-Q1-K1-A3
atcaccgctgttaggttctaccaggagaccttcggcgtccctccggccacgcgagctcgccgaaatggtcgcccacaggttccatcagtaccaggtggtgggtcgcgcgctgccgaccccaaccgatgagcaccccaagatctaccgcatgaagctctgggccaccaacgaggttcgcgccaagtccaagttctggtacttcctgagaaagctcaagaaggtgaagaagagcaatggccagatgcttgccatcaacgagatctttgagcgcaacccgaccaccatcaaaaactatggcatctggctgcgctaccagagcaggactggtaccacaacatg

SEQ ID NO: 14393 - DNA, 330 bp, Zea mays
  Clone ID: LIB3159-018-Q1-K1-A4
gcgtcacgtacgtggagggcatgaacgcctacagcggcctcaaggggctcaacaaggtgaacatgcgcggggtgcgcaagaccgccgactactccttcgccaaggtcgtggcgtcgctcaaccccgcgggcaagaagcggcgcggcggctcgttctgcgcccagatgaacgacgccgccgagatcttcaagatcgccgccaccatgaacggcctcgtgctcgtcggcgtcgccgtcgggttcgtgctgctccgggtggaggccgccgtcgaggagtccgagtagggtgcgtgggcctgccactgtcggctgtcgccccgggccgcagtct

SEQ ID NO: 14394 - DNA, 329 bp, Zea mays
  Clone ID: LIB3159-018-Q1-K1-A5
gggatcagtatccccatggacggtggggtgattctcggaacccatcatatggagcacttactgaccaccagttcacaagaccacgaggccgtggtaagaagctccaagaggaatgggctgttccactgaaatctgtggaggacattagtgagcgcttcacaaacttctgtcaagggaaactcacaagcagcccatggtcagaattggacggtcttcaaccagagacatagattatcgatgaccagttggtgaatattaaccagaagggtttccttacaattaacagccaacctgctgtaaatggggagaaatccgactcgcctactgtt

SEQ ID NO: 14395 - DNA, 466 bp, Zea mays
  Clone ID: LIB3159-018-Q1-K1-A6
gtgtatgtggtcccaaagcgttcttatgatgctcgaaaggcccttcagaaaaatgttatccaacgaggcagcagtctgatagttggagtaaagcctattgatgcagtgcaccgacagcagctggacgagagtttcgctccaagaaacccaagtggatttatggtttccttgccttcgaagtcacttggcttgaagagcacaggcgcatcgaaccagttaggaggctttaaccggctgtatgacctcaaagctaacacaaatgttagccgagatgcaagccgtcgggcaactagcagtgttgctgcaccagcaaaatcaattgtcaccaatgtaatggatttggtatttggcttttgatttggcatggacgattgaggaccaatgcatccggaacctaatttggtttttccgttaacttgttcaaaaatgccaccattccaaaaattaacaccaaattttactggaa

SEQ ID NO: 14396 - DNA, 270 bp, Zea mays
  Clone ID: LIB3159-018-Q1-K1-A7
ctgactcgtggggcttactactgcaaccaccctctgtacaccccagtgagtgatctgcagatgaggattgggtttggttttggggtcgtctgccatgtcgcgaacttctactgccacatcctgctgcagaacctcatgagcccaaacggcagcggcggttaccatatcccccgcggtttcttgttcaacatcgagacctgcgccaattacaccaccgagatctaccagtgggtctgctataacatcgccacacagaccgtggcatgttac

SEQ ID NO: 14397 - DNA, 264 bp, Zea mays
  Clone ID: LIB3159-018-Q1-K1-A8
atcgtggagtggtaaccctactcgtccccttccgcatccgtcgccgcccaattcccccaccgaggggccactctccagtcgacagatccatacatgattggagaggccaaagataacgacgtctatgaagaggagcttctggactacgaggaggactactacaatacggtcgatggctccgctgcctatcccaccggataggtcactaagaaaggctacttctggatccacagtttcatgtttcagatacttactgctcaatcc

SEQ ID NO: 14398 - DNA, 442 bp, Zea mays
  Clone ID: LIB3159-018-Q1-K1-A9
attcactttgtccctggagacatagtgaaagttggtgaaactttactgaaaatggttgtgggtgacagccaaattgtttccccagataatatagttccatccgctggtaagtcccttggagtagagtctgcagttttctcaagtgaaggcaatgttcctggtggaaatctctctacaccagctgttaggcatctagcaaagcagtatgggatcagcataaatgaaattgttgggacagggaaagatggtagggttttgaaagaagatgtgttgaattatgctgtcagcaaaggtgtttgcaaacaacattcgttagcttctgaagggaacattggtcaagttgagtttctagatggagggtaagcattactcgatgaggacttctatgaagataagaaaatccttctcaggggataccagagatcaatgggcaaatcaattg

SEQ ID NO: 14399 - DNA, 382 bp, Zea mays
  Clone ID: LIB3159-018-Q1-K1-B1
gagtccttcctccatcttcctcctccactccactcccaagtccccaccacccccaaccccgtctctccactgcggcgcaagcttcgcttcggctccgctcggctcgagcagaagaaaatgcaacgggcagtgcaggccgtcaggtcacacggcaatgttcttaaatatgctgttctacaacacatcagcgctcccaagccagcaatgcttcctgctgccttttctcgtttcatgtcagtttcatctgctcgcctagaggatcgtggatttgaaactgccactgtagcagatgtcttgaagtctaaagggaagagtgctgatggatcttggctctggtgcaccacagaggatagcgtctatgacgctgtcaaatctatgactc

SEQ ID NO: 14400 - DNA, 425 bp, Zea mays
  Clone ID: LIB3159-018-Q1-K1-B2
gacggacgcgtcggcgtcgggccccgacgcggcgtgcggcggcgtcggcatcctcggcatcgcttgggccttcggcggcatgatcttcatcctcgtctactgcaccgccggcatctcaagtgggcacatcaacccggccgtgaccttcggcctgttcctggccaggaaggtgtccctcgtccgcgcgctgctctacatcatcgcgcagtgcctgggcgccatctgcggcgtgggcctcgtcaagggcttccagagcgcctactacgtgcgctacggcggcggcgccaacgagctcagcgacggctactccaagggcaccggcctcgccgccgagatcatcggcacgttcgtgctcgtctacaccgtcttctccgccaccgaccccaagcgcagtgcccgtgacttccacgtttccggtgctagct

SEQ ID NO: 14401 - DNA, 447 bp, Zea mays
  unsure (1)..(447): unsure at all n locations; Clone ID: LIB3159-018-Q1-K1-B3
atccccctgcataagcccaaatctgttgcgatctaccatcagcagctgtcctattgtattgttcagttcgttgagaaggactacaaattagcagatactgtgattaggggtctgctcaaatactggccagtcacaaactgccagaaagaggtgttgtttctgggggagcttgaagaagtgctcgaggcaacacagcctgcagagttccagcggtgcatggtgccactgttcaagcagattggacggtgccttaacagttctcacttccaggttgctgaacgtgctntgttcttgtggaacaatgatcatattgtaagcttgatagcacaaaatcgtgttgttatatttccaattatatttgaagctcttgagaggaatatacagagccactggaatcaaagcagtcatggtctcacttgcaatgtgcgcaagatgtttttggacatg

SEQ ID NO: 14402 - DNA, 328 bp, Zea mays
  Clone ID: LIB3159-018-Q1-K1-B4
ccagacgatgctgtcatatggaggggtccccgcaagaatggactgatcaagcagttcttaaaggatgtcgattggggggagattgactatcttgttgtggacgctcctccaggaacatctgatgagcacatctcgatcgtgcaataccttcaagccacaggaatcgatggcgcgataatcgtcacgactccgcagcaagtctctctgattgatgtgaggaaggagataaacttctgcaagaaggtcggtgttcctgtcctaggtgttgtggagaacatgagtggtctgaggcagccgctttcagacctcagattcatcaagtcagatg

SEQ ID NO: 14403 - DNA, 366 bp, Zea mays
  Clone ID: LIB3159-018-Q1-K1-B5
cgcaccatcgctatggacggcacggaggggctcgtccgcggccagcgcgtcctcaacactggctcccccatcaccgtgcctgttggcagggctacccttggacgcatcataaatgttattggtgaaccgattgatgagaagggtgacataaagacaaaccacttcctccctattcatcgtgaagcccctgcttttgttgagcaggccactgagcagcaaattcttgttactggaatcaaggtcgtggatcttcttgcaccctaccaaaggggtggaaagattggtctcttcggtggtgcaagagtgggtaaaactgtgctcattatggaagtgatcaacaatgttgctaatgcccatggtgggttc

SEQ ID NO: 14404 - DNA, 287 bp, Zea mays
  Clone ID: LIB3159-018-Q1-K1-B8
accaatcaatcagcatgaagctatggtcattcttcactacatgacttgctgaagaggtcgtcatgtgagttatttctagcttttgtggtttcgattcatgataccccattcttggaactgtaagtcgtgtgcttttggtgattatgtactagatctcccacttgattgtgcttctctcccgcgtaattgaaatatatttgtagtggacatagtttgatggcactcacaaaagtagctgatgagatgttcattggcgatgattgtatgccctagtaggctgttacacc

SEQ ID NO: 14405 - DNA, 464 bp, Zea mays
  Clone ID: LIB3159-018-Q1-K1-B9
caaatccccaattcctccgagttcgagcgaccatgtcggggcgtggcaagggcgggaagggtctgggcaaaagcggcgccaagcgtcaccgcaaggttctccgcgacaacatccagggcatcacgaagccggcgatccggaagctggcgaggaggggcggcgtgaagcgcatctcggggctcatctacgaggagacccgcggcgtgctcaagatcttcctcgagaacgtcatccgcgacgccgtaacctacacggagcacgcccgccgcaagaccgtcaccgccatggacgtcgtctacgccctcaagcgccagggtcgcaccctctacagattcggcggctgaaaggcgctaccgccgctggtggccgtggcaaaagtcttgggtcgcggtcaagaaatcgagagtattctggatgacgtgcttagtttcgtagtattattatcactagtgcttattgttagc

SEQ ID NO: 14406 - DNA, 330 bp, Zea mays
  Clone ID: LIB3159-018-Q1-K1-C1
tggaaaccctagccgccatatctcacgatccactcgagcaccaagccgagggaaggtgatgagcgatggctctcggcgtggtgtcggcgaaaggcggcgcggtctcgggcaagaagaaagggtcggtttccttcacgatcgactgcaccaagccagtggaggacaagatcatggaggtcgcctcgctcgagaagttcctgcaagagcgcatcaaggtcgccggcggcaaggctggcaacctcggcgactccgtcaccatctctcgcgagaagaccaaggtcaccgtcacctctgacggacccttctccaagaagtacctgtagttcttga

SEQ ID NO: 14407 - DNA, 323 bp, Zea mays
  Clone ID: LIB3159-018-Q1-K1-C10
cctttgtctggccgactaccccaaagccttctccgatctcaaggtgtaggagctcattaacggccgcctcgccatgtttttcatgttcggctttttcgtccaggccattgtcaccggcaaggtcccgctcttgtacctcgctgaccacattgttgaccctgtcaacaacaacgcatggtcctacgccaccatacttgttcccggcaactaaactcatcggttatgctatgcagcttcattgtctttcggatcggagagggtgtacttacgtggtttgattgatgctgctagatgcatgtgtgttttttgttttactttgcatt

SEQ ID NO: 14408 - DNA, 391 bp, Zea mays
  Clone ID: LIB3159-018-Q1-K1-C2
gtttacaatgactagttcatgatgtgtcagaaaatttttgaattcacatggatttccataggaattagtgcggaggagttatagctataggaatgtacagtgagaaaatgtcaaggtatccaacaaactcatactgttaacaacgtgctaacttgctgcaagtgcagcacttattttaaccacgtacctcctatcattcggcacaatacataaatagaatattaacagtagaatcaattaatctgaatggacgatacagctgccgatacctcccttgttcttgggtcatcatcttccaatgagacaccacggcagtcttctctaacgagaagtggcaaaacgccagcagaactccaagcattttgctaccagaattactggcatcccccaa

SEQ ID NO: 14409 - DNA, 408 bp, Zea mays
  Clone ID: LIB3159-018-Q1-K1-C3
cattcccacactgacaggaaatggcgaacactgaagtttcgtttctttgttactagagatatactattcatctttgctctagtccagactgtcatctctgcattggcatacttggtacattttcttgatgggtaccagcaatattggttgaggacagcctggggttttgataaccaagttagtttttattacatatgtggtgcattattattttttgctctattgggactatcaggttgcttcataacctgttatgaccgaagagtacgaaatgatttggctcagccttgtcgagaattatgtctttgttgctgtcaaccagagtatgcattagttagctcattcttcaactcatcaaagatgtgtgcagattgccatctaccctgcacgttatgcatgtggactgac

SEQ ID NO: 14410 - DNA, 370 bp, Zea mays
  Clone ID: LIB3159-018-Q1-K1-C6
accgcctctctcaatctgataccgcagatccgtcgtccggtgagtggaagccgcacgaacccatggcctccggcgagcttgcctgcacctacgccgctctcatcctcagcgacgatggcatcgccatcaccgccgagaagatcgccacgatcgtgaaggcggccaacatcaaggtcgagtcctactggccggccctcttcgccaagctcctggagaagcgcaacgtcgaggacctcatcctctccgttggatctggtggcggagctgctccagttgctgctgccgcacctgctggtggtgctgcggctgctgctgccccggctgtcgaggagaagaaggaagaggccaatgaggagtctgatgacgacat

SEQ ID NO: 14411 - DNA, 434 bp, Zea mays
  Clone ID: LIB3159-018-Q1-K1-C8
ccttcacgtaatctcgcgtctcctccgccgcccccgtcttctcctcccctcttgctaaagcaaagcgacctgcaacccgcaattattcctcccccgcacgcgaaatccgcccgcagctcttcgtccccggaggaccaagcctgcgcaccagagatgtcgtacgcctacctgttcaagtacatcatcatcggcgacacaggcgtcggcaagtcgtgcctgctgctgcagttcaccgacaagcgattccagcccgtccacgacctcaccatcggcgtcgagttcggggcccggatgatcaccatcgacaacaagcccatcaagctccagatttgggacacggctggtcaagagtcattcagatccataactagatcatactacagaggcgctgctggtgctctttaggttatgacattacttggagggagactttc

SEQ ID NO: 14412 - DNA, 426 bp, Zea mays
  Clone ID: LIB3159-018-Q1-K1-D1
cagcagcagcagcagcacagcggcgcgggcgctggctcgtccccgtcgtcgtcttccgtgaccacgtgctccgtgaagcgccgcggcggcgtggagcaaggcgacggctgcgactcgccctccggcggcgggatggtggccgcggcgtgccccaagtgcttcctgtacgtgctcatctcccggagcgacccgcggtgcccgcgctgcgagtcccacgtcccggccccgccggcgccggcgccggccgcgagcaagaagccgcggatcgacctcaacgtcggctacctgggcacatagcttgtggtttaggcatatggagcgatggcgtagccttctagatggagcggctgccggtctctaccgtaccgtacgtgacgccataaatttgcttatgctcgtgtaatgtggatacccacggcccgagtc

SEQ ID NO: 14413 - DNA, 444 bp, Zea mays
  unsure (1)..(444): unsure at all n locations; Clone ID: LIB3159-018-Q1-K1-D12
ctccggcttcctcctctacaaagagctcggtcgcaggctcaagaaaactaacccggtcgtggcggagatcttctcgctcatgtccagggacgaggcgcgccatgctgggttcttgaacaagggtctgtctgacttcaacttggcgctggacctggggttcttgaccaaggctaggaagtacaccttcttcaagcccaagttcatcttctatgccacctacctgtccgagaagattgggtactggaggtacatcaccatcttcaggcacctcaaggcgaacccagagtaccaggtgtaccccatcttcaaatacttcgagaactggtgccaggacgagaacaggctcggngacttcttctctgccctgctcaaagctcagccgcagttcctcaatgactggaaagccaatctcttgtcacgggtcttctggcccttggtgtatgt

SEQ ID NO: 14414 - DNA, 413 bp, Zea mays
  Clone ID: LIB3159-018-Q1-K1-D2
gtgagctagcctcccgagccctatctatccttttctcggcacctcgcgggtctcccgtccgccccgtgccgcattcgtatcctctcctcactctcgccgccgccgcttcccctgcgccccgagccaagatgaatgttgaaaagctcaagaagatggcaggtgctgtgcgcactggggggaagggtagcatgcgcaggaagaagaaggcagtccacaagactacgaccacagatgataaaaggcttcagagcaccctgaaaagaataggagtgaacaccattcctggtattgaagaggtcaacatctttaaagatgatgttgttattcagtttgtgaatcctaaagtgcaagcttcaattggtgctaatacatgggtggtcagtggaactccacaaacaaagaagctgcaagat

SEQ ID NO: 14415 - DNA, 371 bp, Zea mays
  Clone ID: LIB3159-018-Q1-K1-D4
caaagccatcggaggagcagctggacgaccattttctcgccgctgctcaagtcgcactctcagctggccgccgccgccgccctgcactccgtgaggagagccgaccgctgccctgcgacaatacacctgggcaagttccatgaccacgggctcaggtccggccgttctaagagatccggttcagcgaaggtgggcgccttcccgtcgctggacgtggtgccgctgatggtgacgatggtggagcacgtggacatgtcgcgggactacgtcgtgaccaagtccatctggcatctcagcgacgcagccctcaagagcgtctataccttctacgccatgttcaccgtctggggagtctgcttcttcgcgttcat

SEQ ID NO: 14416 - DNA, 61 bp, Zea mays
  unsure (1)..(61): unsure at all n locations; Clone ID: LIB3159-018-Q1-K1-D7
atttttctttattctatagtctgtattatgtatgcgtatgagtattgagatgattctgcnt

SEQ ID NO: 14417 - DNA, 329 bp, Zea mays
  Clone ID: LIB3159-018-Q1-K1-E1
gccgccgccgccgcctgcatcctgctaccacgggtcgagacgggtagatgaggaggaggaggagaacagctcgtcactgacgctgtgagttgcggggcgaccacatccatccgttccccctttcccttctccatttcccctttccggagccagggtaatggggcagatgggaggaccagacggcgacggcccgcaccaccagtaccactaccaggcgctcctcgccgccgtgcagaaccccagccagggcctgcacgtgcctctccacgcaagagcgggagcgcccgccgccggaccaggacccagacctggagctgatgctgatgcct

SEQ ID NO: 14418 - DNA, 392 bp, Zea mays
  Clone ID: LIB3159-018-Q1-K1-E11
acgagatctacatcaactcccaggcctccttcggtgagctgaagaagatgctgtcggcgcggaccgggctgcaccccgaggaccagaagctggtgtacaaggacaaggagcgggactccaaggcgttcctggacatggccggcgtcaaggaccgctccaagttggtgctgctcgaggaccccgccgcgcaagccaagcgcctcctcgagcagcgccgcaccgacaaggcggagcgcgccgccaagtccatctctcgcatcggcctcgacgtcgacaagctcgccaccaaagtgtcggcgctggaagccatcgtcagcaatggcggcaaggtggtggacgctgacgtggtcgccctcaccgatgcgctcatgaacgagctggtcaagctggac

SEQ ID NO: 14419 - DNA, 352 bp, Zea mays
  Clone ID: LIB3159-018-Q1-K1-E2
ctccaacctggccggcagccgcaaccccagcctggactacggcttcaagggcaccgagatcgccatgggctcctactgctccgagctccagtacctgggcaaccccatcaccaaccacgtgcagagcgcggagcagcacaaccaggacgtgaactccctgggcctcgtctcggccaggaagaccgccgaggcgatcgacatcctgaagctcatgtcgtccacctacatcgtggcgctgtgccaggccgtggacctgcgccacctcgaggagaacatcaaggcgtcggtgaagaacaccgtgacccaagtggccaagaaggtgctgaccatgaacccctcgggcgagctcttc

SEQ ID NO: 14420 - DNA, 351 bp, Zea mays
  Clone ID: LIB3159-018-Q1-K1-E3
acgcgtgggtggtcggagctggggcctcagcttgatcccaggctgccgttcgcggaatctctcttgccactagcgacgactgggcgacctccgccgccacactaaaccctactccaggtgcccaggtctgcgtcgggcccttgccggcgacgagcacccgctagttaccactgtgcggtttccaagatggctcgccgtggattgatggaacaggacttaagcaaattggatgtgacaaagcttgacccactgtcacctgaagttatctcacgccaagcaacaatcaatattggtaccattggccatgtggctcatggaaagtctactggtgtgaggctatatccggagtca

SEQ ID NO: 14421 - DNA, 351 bp, Zea mays
  Clone ID: LIB3159-018-Q1-K1-E4
gtgatagcaacgtccaaatggttgtcgacaattctgatgtaacaactaaaccagaggaaggtgatgtagatcatcattctgatacttttgatcataacgagaagactgtagaaactgtgttcgataaagatagtactaacctgcatgaagatgacaagagaaacactgagagttcagaagcggaaggacaagtcaacagtggagatagtaatacagaagctaataataataagaatgaagatgaaaccaccagtcttgtagaaagacgcaagcatgatactgaatccaactctgctgctgagagtaaaagtgaagtcaattcaactggagatgaattgtcccataacaatc

SEQ ID NO: 14422 - DNA, 318 bp, Zea mays
  Clone ID: LIB3159-018-Q1-K1-E5
ccttaaatgagtttgattcaaagattactggtgttgactggaggcagaaacttgagacccagggaggagctgtccttgctacagagctcaagaacaatgccaacaaacttgctcgctggactgcccaggctttgcttgctggtgctgacatgatgaagttgggctatgtgtcacgagtgaacccccgtgatcagtacaaccattctgtgctcactgtgatgggatacaagccaagggattttgctgcacagatcaacctctacactgcaaacatgtggagaatcgtcaagtcaattgtggacatctgcatgatgtttg

SEQ ID NO: 14423 - DNA, 316 bp, Zea mays
  Clone ID: LIB3159-018-Q1-K1-E7
gtggggtttccctgtgaagtgcagcttttcccttggcgggagagaactcgcatctggttcatccggtgggtccatttacttctatgattacaggtcggcaaggcttttgaggaaaatagaagccttcaaagaggcgtgcactgatgtcgcgtaccacccagtaatgcctaatgtgatcgctgcttgtagctgggctggtgaaatatctgtctttgagtgacatgattataatgctgtgtggagaagcatcagcagttcataaccgctagcatatatatatatatatatatatatatatatcttctgagactcaaac

SEQ ID NO: 14424 - DNA, 209 bp, Zea mays
  Clone ID: LIB3159-018-Q1-K1-F1
gcgagaggatgtctgaacaacttatggctgctttttttttacatattattactaagacacaagctacagcagatatagtacttgtgaaaaaaagaaacttctgagctcttttgagggattgatactagattggattgtgtttttgtttttgggtcgataccatcgcctgttcggttccacaaaattgactgtcaactatatttacctta

SEQ ID NO: 14425 - DNA, 306 bp, Zea mays
  Clone ID: LIB3159-018-Q1-K1-F10
caagacatatggccgggctgcgcttaccgctcttgcatatgcaatgaatgatgaatgggtaaagatctttatccagcaaaaggattactattcaaatgaccctagtgcagatagaataaaccgcatgagaggtgaaatcaatcatgtccgttttgttatgattgataacattgataaggttcttgaaagaagtgatcgtcttggaactgctggttgacaagactgcaaatatgcatagaaatacatatctattcaagagacaagctcagcggttcataaacactagttggtggaaaaatgttaaac

SEQ ID NO: 14426 - DNA, 459 bp, Zea mays
  Clone ID: LIB3159-018-Q1-K1-F11
tcttaccctgctaagttccaattccaagtggtacctcctacagtggcggaagcgttttgttgttacctgtcactgcttcagccgttgactgcctattgctttcgttattagtgaggctttcgcaggaagtgcaggcagccggccgtcgacaccaagcaagccttgcgcttatggcagccgtggtgctcggtcttatcaccagtggtgtcgttagatgccaaatgcagtttgctctgcatggggattttgctttctggtgtctgtcccgttggaaatgggtagttcctgagtgacgaacagacttcccatggcagctattctgttgaggatgtgcgaaaggtgcactgcagagtctgagaagtgagaaaaaaaaatgacaagtgcttgttaccgctcacccatttttaaccaatgccacggtgatacaattatctgtgctaaagggacaattgtttcaac

SEQ ID NO: 14427 - DNA, 298 bp, Zea mays
  Clone ID: LIB3159-018-Q1-K1-F12
catatggaaagcatgttggcttttaaacagttgttatagtttggagataatagagcgttttctatcttgtcttttcagccgcttttattgcattctgttgggaggaatccttcttatgtatgaactgctcaatttcttacgcccacttcttctcctagatttactccttttgggtacctcaaattgtcacaaatgtcattagggattcaagaaaacctttgcacccacaatatattttatgcatgacagtttcacggcttgctaattcattgtatatattttgtttccctattatttt

SEQ ID NO: 14428 - DNA, 386 bp, Zea mays
  unsure (1)..(386): unsure at all n locations; Clone ID: LIB3159-018-Q1-K1-F2
gttcacagatgaagagattgaacaaagctatgaataattttatgaagatgtacatacagaatttctgaaatttggtgaacttgtgaatttcaaggtatgtagaaatgggtctttccatcttcgagggaatgtttatgtgcactataaatcgttggattcagctcttcttgcctacagcagcatgaatggacgctattttgctggaaaacagatggaaggcggccatatgcggtgagtacatgaggtcaagatacaagacatgttcacatggagttgcttgtaattttattcactgcttccgcaatcctggaggagattatgagtgggctgattgggacaatcatcctnctagatactggattaagaagatggttgctctttttggt

SEQ ID NO: 14429 - DNA, 352 bp, Zea mays
  Clone ID: LIB3159-018-Q1-K1-F3
ctcgaggactacttccccccgaatatggccatggcggacgtgctcctccggctggtgtccgtcaaggcccggcggctcaaccagaggtggaacgacgtgttcgacgagctcatccaggaacacgtgcagagcaagccctccggcgagagcgaggagagcgaggcggacttcatacacgttctgctctccatacagcaagagtacggcctcactacggacaatctcaaggccatcttggtggacatgttcgaggcaggtatagagacatcttacctgacgctagagtacggcatggccgagctcatcaacaacaggcacgtcatggagaagctacagacggaggtgaggacga

SEQ ID NO: 14430 - DNA, 351 bp, Zea mays
  Clone ID: LIB3159-018-Q1-K1-F4
cgttctcaaaggctgttaatcagcgcgacgctgaccttgtctacttctggcagaagtaccggaaatgggcagactgctcacctgagaaaaatgaagctcggaaggagttgcttgaagtgatggcccacaggtctcatgttgacagcagtgttgagctcattggaagccttctctttggctctgaggacggtccaagggttctgaaagccgtccgtgcagctggtgagcctctggtcgatgattggagctgtctcaagtccacggttcgtacttttgaggcgcaatgtgggtcgttggcgcagtatgggatgaagcacatgcggtccttcgcaaacatctgcaacgctggca

SEQ ID NO: 14431 - DNA, 366 bp, Zea mays
  Clone ID: LIB3159-018-Q1-K1-F5
caattgccaacatgtctccagaatatggagctaccatgggcttcttccctgtagaccaagtagcatgggactatctcaaactgacaggccgaagcgatgaaactgtgtcgatgattgaagcatacctgcgagctaacaaaatgtttgtggacaagcatgagcctgagacggaacgcgttttctcttcacatctggagctggaccttagtgaggtggagccttgcgtttcaagccccaaaaggcctcatgatcgtgtccctttgaaggaaatgaagtcagactggcatgcttgcctggacaacgaagttggcttcaagggctatgcggtgccaaaggaacagcaagggcatagttgtgaaattcgac

SEQ ID NO: 14432 - DNA, 433 bp, Zea mays
  Clone ID: LIB3159-018-Q1-K1-F6
acagcaccagcgacggaccgggcaggcagagaaaaagcagaccagacgagacctctcgcgttccgggctcctccctgcccctgctgccgttccccttcttcctcagttctcccgcccgctgctgccctccgtccgcgtccagatcccgccaccaaccgatccggcgccctccatcatggcgggggcgggggcgaaagcggcgggagccctggctctggcgctcgtgctcgcgctcgcgggggccaactcggagggcgacgcgctctcggcgctgcgccggagcctcaaggaccccggcggcgttctgcagagctgggaccccacgctcgtcaacccctgcacctggttccacgtcacctgcgaccgcgacaaccgcgtcacccgcctagatctcggtaatttgaacttatctgggcatcttgtgcctgagctt

SEQ ID NO: 14433 - DNA, 335 bp, Zea mays
  Clone ID: LIB3159-018-Q1-K1-G1
cggacgcgtgggttccgctacaagttcgccaacgagaagctcaagcgcacggcgcggtactactcgtggcaactggcggacgtgggccgccgtcaacatccagctcgcgtggcgcaggtatagggcccgggcatcgacggacctggcggcgatggccgcgccgccgttggcgggcggacccgacgacggggaccggcggctcagacactacgcggccatgttcatgtcgctccggccgcatgaccacctagagtgatcaggaggggggacgggaccatcctatctgtgcccgccggggtcatggtgtctgtacagaggacactagtgggatgttg

SEQ ID NO: 14434 - DNA, 239 bp, Zea mays
  Clone ID: LIB3159-018-Q1-K1-G2
gttcaaaagcacagaagtactgctcttttgtttcctgtacaattggaaccaagacttgtttgttttgcgtttgaaatatcaacagttcagagaataatctgtatctgacatctgtttaattgaacaaagccaaatactttgtcaattgtgtatgcacaattatttccgccgccggggcagatccatgaacaccggaaaaaaacatgtttcacagtttataaaaaaaatgaataatatta

SEQ ID NO: 14435 - DNA, 399 bp, Zea mays
  Clone ID: LIB3159-018-Q1-K1-G4
gcagtatcagttttagttccatgcagcagtttggcattgcaggttcttccacagtgcaggacaaatgggaggcagtagacagcagtaccccttttggctttccccagaagtttgacaccgtgagttccgcttcagaggatatgtccaaagcagactcacctgagccgacatttttttctgggaatcataatgtgcaatcagaaaattgcagttccctgttcacacagagtccaggaaataatttgagttccaaatcttcagaaaatttgaactctggaagctcgcatagttttgcagatttcaccagttggtcagcatcaatgtgctctatcccttcgaattcaaacttctttgtttttttgggctgctggcttcagtgcaagaagtgctccaccatct

SEQ ID NO: 14436 - DNA, 300 bp, Zea mays
  Clone ID: LIB3159-018-Q1-K1-G5
agcaaatattgcgtacatacgagctaatagtggggctgttgttacaattcaagagagtttgggtaggcctgatgatattactgttgaaataaaggggacatcttcacaggtgcaagctgcacagcagctcatccaggactcgttggctgcacaccgagaacctgtcaggagcagttatgtgggggcaggattagattcagtatataggtccagctactcacaatatggcagctcaatctatcccacgtcatcactgccgtcttattctagcatcgatgatgttagtagatacccgtcttc

SEQ ID NO: 14437 - DNA, 354 bp, Zea mays
  Clone ID: LIB3159-018-Q1-K1-G6
gccgcaggcggtggtggccgtgctggtggcggcggcgctgctggcttcgtccgcttcggcggcgagcacctgcgggcaggtggggtcgtcgctggcgccgtgcatcccgtacgcgacggggagggccagcgcgctccccgcgtcgtgctgcagcggcgtcaagagcctcaacagcgcggcgcggaccagcgcggaccgccaggcggcgtgccgctgcctcaagagcctcgccaacagcgtcaagagcgtcaacatgggcaccgtcgccaccatccccggcaagtgcggcgtctccgtcggattccccatcagcatgtccaccgactggcacaagatcagctaagttacgacgac

SEQ ID NO: 14438 - DNA, 335 bp, Zea mays
  Clone ID: LIB3159-018-Q1-K1-H1
gcggcggcggcggcggcgggccggcggagactcccaggccaggagcagtctgccgattggaaggggagatgaaggccacgctcaagggccgctacgagggcgacaaggccacggccgccaccaccctcgccgcccccgccggcgacctccgcctcaaggcctccgccaccgaggccgccttcaccaacggtccttccctgcgaggcctcaccctcaccctcgagaagcccggcgccttcctcgttgacctcaagccccacaaccaggatgtgcgctttcagttcatgaactccgcgctcgtgctcgacaagcgcgttagcctcacctacactcac

SEQ ID NO: 14439 - DNA, 212 bp, Zea mays
  Clone ID: LIB3159-018-Q1-K1-H2
gcagatgcccttgttcttaatgctgcggcgtcccttcttgtcagtggggaaatgaaaaattttcatgacggggttgctttttcacacgagacacaacggggccgggaaaacacctatacaccttgggcctggataaaaaaatcaaatagttccccaaactgagggaagatgggttgccatatataggtttttgcgataagacatgaggaatg

SEQ ID NO: 14440 - DNA, 326 bp, Zea mays
  Clone ID: LIB3159-018-Q1-K1-H4
ggaacccccggggttcctatgctgggaagcagtcatgactgatgctcgggttgttcgcttgatgtggtctgggcccgctaggggaagaaggatggttgaagaaagctcgctggaaagccgcctgatgatggctctgcgtcatttgtacttcagttttcaacttttcatcatgttatttcgttgcatgagacgttcgtccgactgagcagggagatttccgaacagttatgccactggctgggaatgagaatttttgaacactgaactccggctgaatcatgtagtcaggagctgtaatagcattcagatagtcaccggttgggagc

SEQ ID NO: 14441 - DNA, 313 bp, Zea mays
  Clone ID: LIB3159-018-Q1-K1-H5
ggcacatctccctcccagctgctgcaagtaggactaagtagtaaatagccatatacataggttgagtggatcgttaagagagggtagccatatacataggagtactggatagtatacaagaacggtagatacagggcaggggacatgatgctgggaaagagatctgggcgcccgtcgccggcgtctcagcagcacatgcggcggaccacgagcatgacggagttcgcggcaccgcacgtgctggtagacatctcggaagaagaggaggacgaggagctgcagcttttgccggcgcacgccgaggtcacatggg

SEQ ID NO: 14442 - DNA, 419 bp, Zea mays
  Clone ID: LIB3159-018-Q1-K1-H9
caccactcccaagccagtacccacagtcctacgagcagtcgcacgcaagtgtcaagagacgaaacggtcgacatggctcgcacgcaatctgccgtagcggtcgccgaggtggccgcggtgctgctgctggcagcggcggcgacgacctcggaggccgccatcacctgcgggcaggtgagctccgccatcgcgccctgcctctcctacgcccgcggcacggggtccggcccctccgcgtcctgctgtagcggcgtcaggaacctcaagagcgccggcagcaccgccgccgacaggcgcgccgcctgcaactgcctcaagaacgccgccaggggcgtcagcggccttaacgccggcaacgccgccagcatccccttcaaatgcggcgtcagcatcccctacaccatcaacaccttcaccga

SEQ ID NO: 14443 - DNA, 341 bp, Zea mays
  unsure (1)..(341): unsure at all n locations; Clone ID: LIB3159-019-Q1-K1-A1
ggccgtccatcgcttctttagcaacctctttttctgtaccggcgccggaacccttgcggagtgtctcatggagaaagccgcgcgccagctccataangaacaggaggagccagccgctttggctgctgcaacggatccttatcgttacgtccagaagccgaaaccgattcctgatccacaggacactgtccttatctatgggaagaagagggagcctaccaaatctcaagattagctagcgccctgggcacatcttgtaccaaatgtgcccccagtttatgtgcaacaataccaggaatggtttctgcgtattttctggatacaaggtaaaacgttttttt

SEQ ID NO: 14444 - DNA, 312 bp, Zea mays
  Clone ID: LIB3159-019-Q1-K1-A11
ccggccgtaacagggcgccagcgtcaccatgacttgctaactcctacaattttttaactagctgggaaacgcgtgtcttgatgaacaggggacggaacagctgcaagcactgctcttaggagatgatcaacgatgtttcacctgctgatacatatctctaaagcaagttgtaaccatggagtctcgtctgccacattcagcaacaatgttttactacacgtgctatctatataaatgaggctcttcactgaactaatgttcgatgttataagtctacagctttgttgatctacctattaagtgaatgacttt

SEQ ID NO: 14445 - DNA, 313 bp, Zea mays
  Clone ID: LIB3159-019-Q1-K1-A2
atgaaggccaattgttacccacgccattgctagtacttggactgatgtctaatgttcggaggtgctgttggctgaagggatgtcaatgctgatgagggcatcataaacactacactctctatccatggcattaattgataccgacttggatataagtgcgatttaaactacctaactactagaagctggcctggttacaactgttctagaggacatgaaacgcgaggtattatatctaactgatgaacatgagagagaagggcatagctgatagtctacttgtgaatctcttaggtcacagctggtagcatca

SEQ ID NO: 14446 - DNA, 315 bp, Zea mays
  unsure (1)..(315): unsure at all n locations; Clone ID: LIB3159-019-Q1-K1-A3
cacgcgtccggtggacgacatcctggctctcatcgttgatcgctgcgacggcgtcattggacagcggacgcgagactggggggacgtgctgttctctgcgctcaagcgcgccggaggcacggtcttcagcaacatggccgtcggctacaacaacgtcgatgtcgaggctgccaacaggaatggcatcgcaatcggcaacacgccgggcgttctgacagagacaacagntgagctcgccgcctccctctcgctggcggcagccacgaggatcgtctaggctgaccagttcatgagggctggcctctatgacggatg

SEQ ID NO: 14447 - DNA, 387 bp, Zea mays
  unsure (1)..(387): unsure at all n locations; Clone ID: LIB3159-019-Q1-K1-A4
cccacgcgtccggccgctggcggcgctgctggtcgtgctgtggttccccgtgggcttcgcgctcgcctgcctgcgcatcgcggcgggggcgctgctgcccatgccgctggtgtactacgccttctgggcgctgggcgtgcgcgtgcacgtccggggcgccccgccgccgccgcgcgccgagcgcgccacgggccggaggggcgtcctcttcgcctgctcgcaccggacgctgctggaccccatcttcctgtccaccgcgctggggcgccccgtggcggcggtcacctactcgctctcgcgcctctccgagttcctctcgcccatccggacggtgcgcctcacgcgggaccgcgcctncgacgccgncatgatccgggacctgctggc

SEQ ID NO: 14448 - DNA, 347 bp, Zea mays
  Clone ID: LIB3159-019-Q1-K1-A5
cgacccacgcgtgcgcgcaccgcggtgacatggactatatttagcacgccctcaccctcttcaccgacgtcggggctgtccttgaccgcatccgtgtcatcatgctcaagaacgcggctgacaagtcggaggacaagaggaggaagaggaggaggtggtgaaaatctgtgtgcgaacacagcactcaagggaagggaaggaactggtgcgtctgaaatgaagctcgcacataactaggtgtatacatatataggagcgaggagttactttgcggtggaactgaactgtgcaagtgtcgttccttttgttttctcttgcctgttgaatgaatgtgacaaatctccacc

SEQ ID NO: 14449 - DNA, 355 bp, Zea mays
  Clone ID: LIB3159-019-Q1-K1-A7
cgttagactaggttaggctagggtgtcgaccagctcgcggaaatggtggcctgcgggttccatcagtaccaggtgggggggcgcgcgctgccgacgcccggcgacgagcaccccaagatctaccgcatgaagctctgggccaccaacgaagtccgcgccaagagcaagttctggtacttcctgaggaagttgaagaaggttaagaagagcaacggtcaggtcctggccatcaacgagatcttcgagcgtaacccgacgacgatcaagaactacggcatctggctgcgctaccagagcagaaccggctaccacaacatgtacaaggagtaccgcgacacaaccctgaacggcgctg

SEQ ID NO: 14450 - DNA, 288 bp, Zea mays
  Clone ID: LIB3159-019-Q1-K1-A9
acattaagtacatccgccctcatgatgctggatgttatgccaaggagtttgataatgagaggccatacactattatgtgtggtccagataaatgtgggtcaaccaacaaggttcatttcatccttaagcacaagaatcctaagactggaaagtatgttgagcatcacctcaaattcccaccttctgtcccatacgacaagctctctcatgtctacacagctatcttgaagccagacaatgaagtcagaattttgatccattgggaaaaaaaaaagaaaggcaaccttc

SEQ ID NO: 14451 - DNA, 432 bp, Zea mays
  Clone ID: LIB3159-019-Q1-K1-B1
ccggaagacccggcgcgagccacgcgtccgcggacgcgtgggctgacgcgtgggtgtggttagacttcctgcccagcgaccggcgagtgggtgctgtcccaccagcggacgctgccacgcttcactccgccgggctcctacacgatctacatgaagattgtcggggacgacaacgaggagctgagctgcatctcgttcgggttcagcatcggcttcgtcgcgtccagctgaacacgtccgagcccgggcacgagaggcatccagctcatggatgtaattacgtgaagcacactctgtatcctatgactttttgtgggtgtctgtgttcaactgagacgtttttatccggagttgaacatcacagtaaagcaaagtcactgataccatgtaatggaactctgagcgcttgatggggcccgcgttttttagact

SEQ ID NO: 14452 - DNA, 396 bp, Zea mays
  Clone ID: LIB3159-019-Q1-K1-B10
ggcgtgggataaaatgatgctgctgaaagtactcttgagccagtttttttccctacaagaaacaacaacgggggggcttgtttgacgaactggggggtacttgttgataacctcaaccagcttattactgctgatgtatttcaacaatggaatggtgtaagccaagaatggagtactaactccctaaagctttgctgttcagcaatatgcttcatctgagaaaacaaaatctcaggtgaaatctttcttaagtcacaacgcagaacagctatacgtgtacagatcgctaccccttggacatgatcggagacagaaccggtattggcagaattctgcctcttcatcatcctatgaccctggctcgggaagagacttttttgaatctagagatggata

SEQ ID NO: 14453 - DNA, 252 bp, Zea mays
  Clone ID: LIB3159-019-Q1-K1-B12
ccataaaagactgcatcccaatccacatcctcctaccactttcaccacgtcgcaaacccctactgctacctctactcccttgagcatgacaatcaacctcacgattacatacaagacgacaagaccatttacgaatcttattacgctcccaacaccatcttcaagaaaactgatgctaacaaacactttcaaattactgtttttgacgaccttgaaaccaatctcatacatgagctcaaaacagaattctac

SEQ ID NO: 14454 - DNA, 369 bp, Zea mays
  Clone ID: LIB3159-019-Q1-K1-B2
ggctttgcccgtgtcaaggaaggccttgatgatctgatcctcgacatcccaaatgggcaggagaagtttggagagtatgtggagctggcaacagagcgcggctggctgctgccgaccttcgcctccgttccctgagcatccaccactggcgataccttccttatgtgtacatttgtgcccatgatgtcattagctccgtaccaaagttttcctattcctagtttacttatgttaccgtatactggaggattgtaggatggatgtggtgtcggttgttgagatagtgtcctattggtctagtctgggagggtacttttgagagttaaaagaataaagccatttcgtttcaggttatgagatgtacgctgc

SEQ ID NO: 14455 - DNA, 395 bp, Zea mays
  Clone ID: LIB3159-019-Q1-K1-B3
tttattattatcatcacatccccagatcctccctctggtgcctgacgtcatacatggctgtgcccaagtggtggtatccccagatgagagcgatgaagtgaaaacaaatattggcaaggctatttctcacttgatatctgtctatggccagcaaatgcagccaatactgagtgcccttccaccagcccatgcaaacgcgctggcttcatttgcgagtagaagatgaccttggaggaccagcttttctttggttccttgttctgcttgattttgttttggttttgtcgacgattgccattttctgaggatctggtcacatggatcaggccagatgggagtgcttgcattgcacattggcaagggcgagcggagttgtcaggttggcgcatgattga

SEQ ID NO: 14456 - DNA, 389 bp, Zea mays
  Clone ID: LIB3159-019-Q1-K1-B5
gttcctacggcggtttctcagaagctccgtgctgctgggcctgcctctctgaaagcgcctaatatggacgttgaggaggagaagccgatcatcaagctcgcagtgaacaatatgaccaactcaaacgcatatcactaccctgccgtcgtcggccacaacatcatacccgagccattcatgcagactcagaacatgccattcgctcctctggtgaattatgctgccctagtgaacctgtcttcagaccaaggcagcaactcgttcggttgctcggacttcagcctcgagaacgactccaggacccctgacataacttcggtgcctgcgcccgttgccaccttggccgccgttggcgagtctgtgttcgtccagaacaccggcggccatgc

SEQ ID NO: 14457 - DNA, 313 bp, Zea mays
  Clone ID: LIB3159-019-Q1-K1-B6
gttcctacttcgtgtcacgcacatgttccatgctgctgccccacactctctgagggggcctattatggacggaggaggaggacaaccccctcatcaacctcccactgatcaataagaccaactcaaacgcatatgactacactgccgacgtcatccacactatcatacccgacctattcatgcatactcataacacgccattcactcctctgaaaaataatactgccatactcaacctcactccagaccataacagcaacttccacggctgcttagactaaatcctcaataccgactacacgaccattgatat

SEQ ID NO: 14458 - DNA, 402 bp, Zea mays
  Clone ID: LIB3159-019-Q1-K1-C1
ccacttgcttgagtagctaagcgcgttattaatggcgtcgctgtcgtgcgcctccaggcgttcctgtacaccgggctgctgcccgcagcccttggcggaccgccgcctcacggcctctctccgggctccgtcgctggtcatcgtcgcccaggggaaggtgaataaacaccctcatgtcatattgacagatgacatacaacaggtggggaagaaaggggatacaatgaacgtgcgagctggattctaccgcaactccttgcttcccaagggcaaggctgcgcttctaaccccagcagtccacaagcaaaatacaataatggcatctgagaatgaaaatccacctttaatgccggcaatcatgactcctgggggtgcgcttgatctcgcaactgtactactggg

SEQ ID NO: 14459 - DNA, 463 bp, Zea mays
  unsure (1)..(463): unsure at all n locations; Clone ID: LIB3159-019-Q1-K1-C10
cgggcgggacttggtgctgttgccatatcgtccaactcagttaggtctcatccccaggatggcccaggtcggatggcttaagaagcagagctggtcaaatatcctttcccatatctttacgatgaggtctggccgcaccgtgccttggattcagagatttttcagcgaccatgaagatgcttttttaggccgagtgatatcctatcctttttcagcattgaagttcttcctcgtgactaattttgnttatttttttgttaccaccgcaacctacagtctcaagaggtagccaaggcttttggagcggtctgcacgccagagttctacttgttcaaaaaggatggccggaggccttttgaacttttctaccatggacagttcgatgactcaagacccagtaacaacgtgcctgtaaccggaagttttgcagggacctaagccgcgcgattgactgtgcgctcag

SEQ ID NO: 14460 - DNA, 350 bp, Zea mays
  unsure (1)..(350): unsure at all n locations; Clone ID: LIB3159-019-Q1-K1-C11
gcgtacgnttgaagaatgccaatgctattttatatggattaataacagaaacaaagcctatgggtggtgtgtaaaatgagtgccgggctgctgctaggtttaagaacctgccattggaagcaatgaggtttggtgagcatacttatggagtgagtttccttcaccaaccagttcatccgaaaacttaatttcactttctttagttcttgcttggagttctattattctttaggcaatggtggtcaaaattgttttcatcgttgatcacattcattgcacgtaggaattatcattgattctagttttaggtaactttggttactgttccaatccatatcctgtcatgcttt

SEQ ID NO: 14461 - DNA, 323 bp, Zea mays
  unsure (1)..(323): unsure at all n locations; Clone ID: LIB3159-019-Q1-K1-C12
ccaggcgtncggaggaaggctcctgccaccacattttcttcagcgatttattttcgccgggatcgtcgcacgaggcggacgactatgcagggggggccaccatctcctgctactacgactttccaagaaacaacgagcacgcgctgctcatagcgctggcacatcagcccgtcagcatcaccatcgaggcctgcgccaagaactttcagctctacagcgaccgtgtattctatgggccctgactcacgcagctggaccactgggtaccagccgtaccctacgggacggcagccaaagcccattactacatcattgtcaacaac

SEQ ID NO: 14462 - DNA, 331 bp, Zea mays
  Clone ID: LIB3159-019-Q1-K1-C2
gcaagatctatgcttacctgagcattttttcgagagggatcttgaagctacttgagggcggcctaatggcttcgtctactgctactaaatcagacgccttctacctcatgatgaagggcgactatcacaggtgtggctcatgcatttaatactggcagctgacaggaaggaatctgctgagagcacagtggtagcctatactgctgctcatgacattgctctctctgatccgtcacctacccatccgattaggctcggacttgctctgaatttttcagtgttctattatgagatcatgtactccccagacaaagcttgcaacctggcaaag

SEQ ID NO: 14463 - DNA, 325 bp, Zea mays
  Clone ID: LIB3159-019-Q1-K1-C4
aaaccagcggcgagccacgcgtccggtgagcttctcctttttttacccctttttttcggagaaaggaaatctgaattagggacgggattcaacggggatgcagcggcacacaaagatgaaagaaaagccaacatatcaccacaatgctttttgttacactgaattgatcatacaccaccataaatgtagaacattaacagaacacctcacactcgttataaaaaggatgactctcatgaatatagtcaaaatacactttgaaatacaaacacatacatatctctagactatacatatttctaatacccctgccgcattcacatct

SEQ ID NO: 14464 - DNA, 418 bp, Zea mays
  Clone ID: LIB3159-019-Q1-K1-C5
ctacaactgatgttgtggaagcttgttctggggtcaatgtggccgtcatgggggggggattccccaggagggagggagtggaaaggaaagatgttatgtctaaaaatgtttcaatctacaaatcccaagcatctgcccttgaagcccatgcagctcccaactgcaaggttctggtggttgccaacccagcaaacaccaatgctcttatcttgaaagaatttgctccatctattccagagaagaacgttacttgcctgacccgtctggaccacaacagggctcttggccagatttctgagagacttaatgtccaagttagtgatgtgaagaatgttatcatctggggtaaccactcgtcctctcagtaccctgatgttaaccatgccacagtgaatacttacactggggagaaaccttt

SEQ ID NO: 14465 - DNA, 415 bp, Zea mays
  Clone ID: LIB3159-019-Q1-K1-C7
gtatcatgtttattcagccagtttatcttagccaccacactattgtgatggcggcggaccttcttcagaagggcggcggtggtgctggggcggcttctgcttctgctgtgcgtgctcggccatggagctgcgcaacggaacaacgccatctggagcttctgcgactccatctacgacaccggcaacctctgcatggggggcgggtgcccttcctggctcaccacggcgcatccgccctacggcgagaccttcttatgtcgcccgaccgtacgctgctccgacggccgcgttatcgatgacttcctggccgaacacttatggctgcccctgctgccggcttcgaaagccaactgcgacttgaagaacggggcgaacatggggatcaattgcgccaccaccattgactttgaagttt

SEQ ID NO: 14466 - DNA, 308 bp, Zea mays
  Clone ID: LIB3159-019-Q1-K1-C9
ctcctcccacctcattttctacatttataaaaacccacccgcatcctcgccctgctccttttaataagccggcgggcccaccatctcctgctaccacatctttccaacaaacaaccaacccgcacttttcatagcactcacacatcatccagtcagctttaccatcctagcctacaccaacaactttcatatctacaactaccacttcatctatggccccttactcactcagataaaccacttagtaccagcctatccttacatcacagcagccaacgcccattactacatcatcatcaacaactcat

SEQ ID NO: 14467 - DNA, 397 bp, Zea mays
  unsure (1)..(397): unsure at all n locations; Clone ID: LIB3159-019-Q1-K1-D1
cacgcgtccgcccacgcgtccgctcactcgtccgattcatttggcaacaagtactatcttggccctgctgctctgcatgatatggcgaggcaaattgctacagccaatggccctactggctataatagggattacctgttctcaatggagaaggcattagccagcattagccacgaagatgattcgatcatagagcttgcaaacgaggtgaggaaggtgctcaacagaacaaaggagaccaagatcactggtgccaatgcttccatgaaatcacatgcccctcttgtgcacctgtccgcgcttccagaaggcaccgttgtggactcgagatagcgacctctactcggaatttactttcagctcttgcatgtttgtggntgtggccatcatgtactga

SEQ ID NO: 14468 - DNA, 309 bp, Zea mays
  unsure (1)..(309): unsure at all n locations; Clone ID: LIB3159-019-Q1-K1-D11
gcgaacnacccattatctctctattcctccgcccttatttcagcaccctcccacgtcctcgcgtgcctgttctcccaacggcgggtgcgccccctaactcccccncncccactctggctaccgcgctggtctcctgcgctgctctgccgccgccggccacgcagacttcttcactcacctcgttcgcctcataaaagataatgccaatagcgacgtggagaatctcttctccggcttctccaagacccgcgagaacctctctgtcgtcgacgagctccttacttactgtaacctttccgacaccgaccg

SEQ ID NO: 14469 - DNA, 298 bp, Zea mays
  Clone ID: LIB3159-019-Q1-K1-D2
ggaatggaagcattcttttgggggggttgtccattgcgattattacacacagctggatacatgggcttgatgaagcccggccggccgtgatttattttagcccgcccacagatgcaactagataccgaaataaaaagggtaaacaacatgatcgatcgatttattatgacacaaacacgtacaaacatgcatatatgatcgactctcgatccatgatcatcacgggaagacctcgatgatggacgggatgcctcgggtgtgcgtgatcttgtagtcacggaacccagccgccaggaag

SEQ ID NO: 14470 - DNA, 351 bp, Zea mays
  unsure (1)..(351): unsure at all n locations; Clone ID: LIB3159-019-Q1-K1-D8
catgttccttacaatatttgtttaggcccgctgcctccccatgcctcggcagccatttacatgacgcggtgcggctcctactctanggcttctacctggatctcctaccacgcactttgtgccaccacctctgtcaccatctgctgccaacaatggtggaggtgctgctgctcattgactccaaggtagcaggctgcgctctcctttcaatgcaagagatgcacaggctgctgaccttggctcgctcctggaatgggaatctcaatacctcgtagcgctcagcctcccacatagcagccgatcccagccccgtgtttctactggactgactattcgtacaacagcagttgc

SEQ ID NO: 14471 - DNA, 372 bp, Zea mays
  Clone ID: LIB3159-019-Q1-K1-E1
gctctaccgtgtcgtccatggcatcgatgttttcgatcccaagttcaacattgtctgccgtggagcagacatgagtgtttactacccgtatacggaaaccgacaagagactcactgccttccatcctgaaatcgaggagctcatctacagcgacgtcgagaactccgagcacaagttcgtgctgaaggacaagaagaagccgatcatcttctcgatggcgcgtctcgaccgcgtgaagaacatgacaggcctggtcgagatgtacggcaagaacgcgcgcctgagggagctggcgaacctcgtgatcgttgccggtgaccacggcaaggagtccaaggacagggaggagcaggcggagttcaagaagatgta

SEQ ID NO: 14472 - DNA, 373 bp, Zea mays
  unsure (1)..(373): unsure at all n locations; Clone ID: LIB3159-019-Q1-K1-E2
aaacccgcggcgcccacgcgtccgagttgggcanggttgtggggttgcattattgctcacattggcacgctcagaggttgaggaggttcacgagacagctgcaggggcactatggaatcttgcattttattctggtaatgctctccgcatagtcgaagaaggcggcgttcctgttcttgtaaaaatttgctcatcatcacggtccaagatggcacgtttcatgtctgcactagcactagcatatatgtttgacggaaggtaccatttttgctattttttcttggttgcttaacatgtcttccatttgatattagaatatgttttttagttcttagttgagcaaggcctacaccagccagcactttagttttgt

SEQ ID NO: 14473 - DNA, 395 bp, Zea mays
  Clone ID: LIB3159-019-Q1-K1-E3
tctgtcgatccatgcatcgatcgagatgtatatatatcctggttctagatcccatagagatcatagaactagagccagctccttgttgcccatggccatgacgagagcactggccatggtggccatgttagccactgctgccttgttcttcatgtccgctcgcgcacagcagtgcggtacgcaggccggcggcgcgctctgccccgactgcctctgctgcagccagtggggctattgcggctccactcccgactactgtaccgacggctgccagagccagtgcttcggcagcggctgcggcggcggcggcggtacccctgctactcccccgagcgggccggtgtcagaaatcatctccgaatccctgttcaacgagatgctgctgcaccgcaacg

SEQ ID NO: 14474 - DNA, 258 bp, Zea mays
  Clone ID: LIB3159-019-Q1-K1-E4
gagaaacactcattcattgatacctttgtttatttactcggccacaacagaccatgggggtgctttgacgagagagggcggctcaccaagcatgtacacggtatatgcactgtccccttgatgtaccatgcccgcggcatacatcagttcggtcagcagagacactccaccatacacaactcgaacgatcaagtggacgtggatgcactgctgctctgacatcataatctgatactgcgaattatgagatggctgcac

SEQ ID NO: 14475 - DNA, 328 bp, Zea mays
  unsure (1)..(328): unsure at all n locations; Clone ID: LIB3159-019-Q1-K1-E5
ctacgactttttatatatcgcagggtgctagaacccatcgggggcgatataacgagaggcggctgcttgttgcccacggccatgacgagagcactgaccatggtggccatgatagtcactgatgccttgttcttcatggccgatagctcacagcaaagcggtacgcaggacggcggcgcgctctgccccaactgcctctgctgcagccagtagggctattgcagctccactccccactactgtacctacggcatgcacagccaccgcttnctacataggatgcatcggcagcggcagtacccctactacttccccgagcgggcctgtg

SEQ ID NO: 14476 - DNA, 234 bp, Zea mays
  unsure (1)..(234): unsure at all n locations; Clone ID: LIB3159-019-Q1-K1-E6
tcacaaccccccaccacaagaactggttggatttaatagaagttggctgcccctcacggnaacccaaggaaagaggtataatacatgcttctcacacggtttccccttagttgttttttctttgggctccattaacatcatcaagcacgcgcttatttacatcttcgtggccaatggctctgtctagcatgctgaacacacagacttattctgtaaacttatcaccgttgcctt

SEQ ID NO: 14477 - DNA, 392 bp, Zea mays
  unsure (1)..(392): unsure at all n locations; Clone ID: LIB3159-019-Q1-K1-F1
gcgtccgggtagctattctttagttgtgaagactactatcatgttggctgatctgcaggatttggagagagtaaacgagagctatggggaatattacccggcgccagcacctgcacgatcaacctaccaagtggcggcgctgccactgaatgcccggattgagattgagtgcatcgctgctctctaatcagatcatccaaccactcattaaatcatcaataagcacccaggaatttgtggtagaggtacctgtaccagttcagtgtctgaaaactgcgggtaacaaacctttgtgtcccggataagtgatgtgtgtgtgtgtgtgtgtgagtgaacagtgcatctagtangagaattgttgcgtggtatgttacttggattcttcgctcttt

SEQ ID NO: 14478 - DNA, 397 bp, Zea mays
  Clone ID: LIB3159-019-Q1-K1-F10
cgtacgctgaaaaccaccaccccacttcttaccgccatttattgagctccggctctccccaattgtgagcgttactttacacaggaggaggacagcctaaaaccctaaccccccgaatcggatccggccgccggagcacggaaccccaccccggccgccatggagatgggaggtatgagcgacgctgatcggctgttcttcttcgagatggcctgcaagaactccgaggtcgcgtactagcagaaccccaacgacgccgacaacctgactcgttggcgcggcacgctgctagagctgtcgcaggtccgaaccggacacgacagcctcaagcttcttgaaaatgcggaaaccaaactggaagaggcacttcaaattgatccccacaagtccgatgcac

SEQ ID NO: 14479 - DNA, 326 bp, Zea mays
  unsure (1)..(326): unsure at all n locations; Clone ID: LIB3159-019-Q1-K1-F12
atacaaatttttctacgactaatccatcacccactacgccttcncggcggattcttttaaaaggaggtgcgccccccctacctttctntnctcatntccaacatttctactctatccgatcctgaagaatacaccgagctcgcccaaaattattcttttttcgttgctgagacacataaaccatatctcaacctgtaagtcaacactgcctcctgtaaggacacaaatcgtatcaacatccattcataattccaaacagaactcgtccaataccaatattctaactatccatatatacattcatgtaagcaactctataacatcat

SEQ ID NO: 14480 - DNA, 280 bp, Zea mays
  Clone ID: LIB3159-019-Q1-K1-F3
cacgcgtacgctgaactactcatttactggactatttttttcaacacggcagcagctataataacagtggtgtttattaggggactcaaggtggctattgggatactacctcacttttacaactttgttcacattggctgattcgcgacgtatttcctctcgggttttgctctgttgacatggcctcaatttagctgcttggcaaggcattcattgacacatactaactaacctaccaagtgcaaagcatacacaaatactatgcaggatttcccactct

SEQ ID NO: 14481 - DNA, 323 bp, Zea mays
  Clone ID: LIB3159-019-Q1-K1-F4
actattatattcatgtcacacgtttgttttctacgacgtgcgccaagaaatgctattgggtggatattaccatggagcacgggacggaaataccagtataagttcaaaagctgatctcatgaatattgctatgactactcttagttcaaaaatactttcccaagacaaggagtactttgctgaacttgcggttgatgctgtcttgaggcttaagggtagcaccaacttggaatctattcaaattctgaagaaacgctgaagatctctcaaggattcatttttggacgaaagattcattcttgacaagaaaattggcattgggc

SEQ ID NO: 14482 - DNA, 242 bp, Zea mays
  unsure (1)..(242): unsure at all n locations; Clone ID: LIB3159-019-Q1-K1-F5
ccagcgcacaaacactacgggcggtctttttaagaaggctggcggccccaatacacancccctcctacttcctcaacaacctaccaaccaacgaactcaccaccgaatactccaatggcacaacacttcaccactacaccataaacacatcattcctccactcatccatttatctataaccaccccccaacctattctacagctacccccaccatctcaatctatcaaaacttccacttaca

SEQ ID NO: 14483 - DNA, 220 bp, Zea mays
  Clone ID: LIB3159-019-Q1-K1-F6
cggaaaacccgcggcgagccacgcgtgcgggcccggattgctttggtccgtgtgttccgagcgatcaggaacggtcctatgaggggggaggatccacctggggagcgcactatcatgagaagcctccttcaggctctcgaaaagtctattcagatcgctcgtgtttgaccgtgtaaacgccacacgatcaagcgctgcatctctgtaactattaattaag

SEQ ID NO: 14484 - DNA, 356 bp, Zea mays
  Clone ID: LIB3159-019-Q1-K1-F7
aggtgatcgactccgcgaagcccgtttcctcggcggccgtggagaccatcacgtggctgggccccgaggactacgtggtggccgccggagcggcgtttctcgcgtacctcctcgtgccgccggtctggtcgctggtctcgtccagcctccgcggttacaaaggcgacctgaccccggcgcaagcactggacaaggtgaccacgcagggctacgtcctgatcgacgtgcggagcgacaaggacaaggccaaggcaggattgccgcagctgccatcgaacgcgaagaacaagctcgtctctgtgccgctggaagaccttccgagcaagctgaagggcatggtgcgcaacgcgaagaaa

SEQ ID NO: 14485 - DNA, 341 bp, Zea mays
  Clone ID: LIB3159-019-Q1-K1-F8
ccacccctggcaagcaagagggcgacatcttaagagggggggcagactgaacaactgacgggaggaatttaataagagaagagggggcccaatcccatgaatcttcagcagcagcagtttgttgcaaacaacatcaactcctatagataatgagcacaatcaaattcagcttttctttggtagcatgagaatcgttgtacaatattaaaaagggtgaagaaaacgccccttttaatttgattttttttgtacatctgatgtatatattttacgcctttttgagtacgtaaaataaaaggaacatatctttctgaaattaacttgatgatgaatttggaatt

SEQ ID NO: 14486 - DNA, 379 bp, Zea mays
  Clone ID: LIB3159-019-Q1-K1-G1
ccacgcgtccggatcgagtatcccaccaccccacccttctttgctaaccgacgcaatggcgactctgaggggtccttcctcagggccgggcggcgccaaggactgcgagcagctccacaaggctttcgaaggttggggcaccaacgagaagctgatcatcttcatcctggaccaccgcaacaccgcgcagcgccacgcgatccgccgcggctacgcctaggcgtacggtaaggagctgctgcgcgctctcagcgacaagatccacggcaagttccagaaggcggcgatcctgtggacgctggaccccgcggagagggacacggagctcgctaacgacgaggcgaagaagatccaccccggcggccgcacgctggtggag

SEQ ID NO: 14487 - DNA, 295 bp, Zea mays
  unsure (1)..(295): unsure at all n locations; Clone ID: LIB3159-019-Q1-K1-G10
cacatcactgcantacaaatagagcatgtcctgatcttccaaaatataattggattgcattgtattacctctctcaatctggatatccatagtttttatatctatccttccaacatcactgactcaatcttctcccctcccccttctcaaatcatgaccaatcatccatcctagttgatttttatcccttgtttagcaagctaacaccgatatttttgttctacaatgaaatctcaaacccaattttattttacgttttatctccccattagcaataaaaattttctttacattc

SEQ ID NO: 14488 - DNA, 376 bp, Zea mays
  Clone ID: LIB3159-019-Q1-K1-G2
gttcgcttgaggaaattgagatgtccttgagcagtgctacccctggcaagcaagagtagagcatctcaactgtatggacaaactgaacaactgacgggaggaatttaataagagaagagggggcccaatcccatgaatcttcagcagcagcagtttgttgcaaacaacatcaactcctatagataatgagcacaatcaaattcagcttttctttggtagcatgagaatcgttgtacaatattaaaaagggtgaagaaaacgccccttttaatttgtttttttttgtacatctgatgtatatattttacgccttttgtagtacgtaaaataaagggaacatatctttctgatattacttgattgatgaatttggaat

SEQ ID NO: 14489 - DNA, 345 bp, Zea mays
  Clone ID: LIB3159-019-Q1-K1-G3
ggtcaactcaccctatcgcgcctgctttcttgcaaagcacgcttttgacgaggccgtgcggggaactggacaccctgagcgaggagtcctacaaggacagcactttgatcatgcagctacttcgcgataacttgaccctatggacttctgacatctcggaggaccctgcggaagagatcagggaggcgcccaagcacgactcgagcgaggggcagtaaagccggctatacgtgcctagaagctagtacctagagtatgctgctgtctaatgacactatgcaatgtgacctggaccctggattcttgagtgcgacgcttgtaccagccgtgttatgatcatatgtc

SEQ ID NO: 14490 - DNA, 210 bp, Zea mays
  Clone ID: LIB3159-019-Q1-K1-G4
ccacgcgtacggggccactcaccttatttacccgactcttttcaacaccacccctttcatgcactcggccgacatctacacagcctgggcgagcacaaacacgaccaacccgatttaatcaacccaagaatccgccaaaaccgacgactacggagtaccaacacgtcgtctcacccaacactcccacttatagaaggacagcacccttaa

SEQ ID NO: 14491 - DNA, 326 bp, Zea mays
  unsure (1)..(326): unsure at all n locations; Clone ID: LIB3159-019-Q1-K1-G5
aaacccgcaggagccacgcgtncgggtcacaccattatatccccctttctttttaacaccgccaccctcagcaagcaggctgcgatcttctaaaggttgtggacgaactcaacaactaactcacttcatttattcagctacttgttcaccacactcccattattatctactgacaacatttagcatcatacaacataaactactatagctcctcatcaccacctaatccagctatactttgagaccactattataccttacactattaaaaaggttgaatatgacgctcattacaatatgattttttatctacaaccctatgtata

SEQ ID NO: 14492 - DNA, 347 bp, Zea mays
  Clone ID: LIB3159-019-Q1-K1-G6
cccaccccccccaagcaagaggggggcttctataagaaggtgggcgggctaaacaacctactgaaggaatttaataaaaaaataaatagcccaatcccatgaatcattagcaacaacagtttgttttattacaacatcaactcctatatataatgatcacaatcaaattcatctattctttggtagcatgagaatcatcctacaatattaaaaagggtgaataaaacaccccttttaattaatttttttttgtacatacaacgtatatattttactccttttgtagtacgtacaataaagggaaacatatttttcttgactataatttcattgattaaatttttaat

SEQ ID NO: 14493 - DNA, 243 bp, Zea mays
  Clone ID: LIB3159-019-Q1-K1-G7
aaaccacgcttttgacgaagccagctgtgttcttaacacggtgggcgggcagacctacaacgacagcacttttatcatgcagctccttcgtgataacttgaccctattgacttctgacatcttcgaggaccctgccgaaaagatcaaggaagcgcccaagcacgactcgagcgaggggcagtaaagccggctttacctgcctagaaactattacctaatgtttgctgctgtctaatgacacta

SEQ ID NO: 14494 - DNA, 348 bp, Zea mays
  Clone ID: LIB3159-019-Q1-K1-G8
actgtttctttgtccaaaagcaattgctgctagctggtagtgatttggtggaggccggctggaaaactggtggttacattgtttactcaacttgttcgataatgatcccggagaatgaggcagtgattgactatgcacttaaaaagagaaatgtaaaacttgtgccttgcgggttggattttgggcgtccaggattcatccggtaccgggaacatcggtttcatacttctttagaaaagacaagaagattttatcctcatgtcaataacatggatggattttttgtagccaagctgaaaaagttaagcaatacaatcccggtgacttctgagcagcctaaagcgtccg

SEQ ID NO: 14495 - DNA, 388 bp, Zea mays
  Clone ID: LIB3159-019-Q1-K1-H1
ccacgcgtacgggcatgtgcaatgtttttttcctgtttcttaacatccaaaggatgctatactcaccgagggatttttacgagagcaggtgcatatatatcaaccttgtggattggcaaagaatcctacctggaaacccaataagcaaactaatgacgcccgcaaagctgagaaacatgcacgcaaaaatatgaagatgagaaccataagctctgttgatcaggagaacaagaacaggacaagagattctaatgatcatgaccaccacaaaccaaagacaggaaagcacaaatcaccaagagatggggttgtccttttgcagaaaaggcaggagaagcgttctttggacaagaacaagcccgctgaacatgatattaaaatgcatatt

SEQ ID NO: 14496 - DNA, 374 bp, Zea mays
  Clone ID: LIB3159-019-Q1-K1-H10
cgcagacctctgcgagggcatctacggcaccggcgttggaggggcgtacacggggcagctggtcacggacgcgcgctccggcgcggcctacaacgtgaacggcgtcggcgggcgcaggttcctcgtgcagtgggtgtggaaccccgtgctcagctactgctccggccccaacgcgctcgaccagtagctgtttggtttcggtttcgtttcatctcctactaggatggaatggaatgggattttactacgtaccaatgaatcgaatcctctagcgcatttggattttcctctcctctccccggggaaatccatgggatgcttctgtatagagttgttattatcaattaattaatgccactttcggtggggaaaaa

SEQ ID NO: 14497 - DNA, 275 bp, Zea mays
  Clone ID: LIB3159-019-Q1-K1-H12
ctatccatgccctcccctcttccccctcctctatcatctctcatgcgcccactccccatcacatctcatctcctatattctccatccttgtatcatctcctcgtgatttcatctcaaggactctatggaaggcagcattcttctatcccttccttgctagaataaataacaacagataaaacatcacatctaataacatttggtctcgtaggtcttctattttgcctgaatttgttttttccactgtactcatttacaatgtgaaaagtcatgtc

SEQ ID NO: 14498 - DNA, 425 bp, Zea mays
  Clone ID: LIB3159-019-Q1-K1-H2
ggacattgaagacatcaggaactgtgcctttgtccaaaagcaattgctgctagctgctattgatttggttgatgccaactccaaaactggtggttacattgtttactcaacttgttcgataatgatcccggagaatgaggcagtgattgactatgcacttaaaaagagaaatgtaaaacttgtgccttgcgggttggattttgggcgtccaggattcatccggtaccgggaacatcggtttcatacttctttagaaaagacaagaagattttatcctcatgtcaataacatggatggattttttgtagccaagctgaaaaagttaagcaatacaatcccggtgacttctgagcagcctaaagcgtccgaaggagcagctgaaaaggccgatggagaagatgagaaagttatttctatgaacagaa

SEQ ID NO: 14499 - DNA, 405 bp, Zea mays
  Clone ID: LIB3159-019-Q1-K1-H3
caacaatgcaatctatgctagctactgccaacatggtcgtcacgagctgcttgagagcgtaggcatcagtgcagatgcagtggcgcgcagtggggaatccctggctctctctgagttgaacctcaagtactttgcccctttgaggagtggcgataagtttgttgttaaggtgaggcttgcaggcatcaaaggtgtacggatgatattcgaccacatcattacaaaactgcctaatcatgagctaattctggaggcaaaggcaacggctgtttgcctgaacaaagactactatcctacccgtattcctcgtgaactattgtccaagatgcagctcttcttacccgtggacagcagagggtcaaatgaagacgttaataatcggaataacagctgcaactaattctg

SEQ ID NO: 14500 - DNA, 364 bp, Zea mays
  Clone ID: LIB3159-019-Q1-K1-H4
gacgcatgcgtgccggtgtatattatttcaactgcttattacgcagcctgtcgcatcggctagcgggcggggggttaggtacgctgtgctttgcacacgagctgcgctgcgcgctccgaccaggatcgacccgaccgccgatacacgggtgaactcccggcgcatatcccacagacgacacccggcggaggtgcatcacggctcctcgccacgaaatttatcctgttcgaccacacgcaggaacaggacaaggataatgtgcacatactgacgaaggaaggcatcgcgccagacgccaaaaggattgacgtttttaaccacttgccgtgggacgtggaccaaacgaggctcatgggagacttga

SEQ ID NO: 14501 - DNA, 257 bp, Zea mays
  Clone ID: LIB3159-019-Q1-K1-H5
cggacgcgtgggtttttctatctttttcttagtttatattcagttgctgcttgctggtgtttatttgattgatggcggcttcaacatcgttgaatacatccagtacccgactggaacatcaagaaccccgcacgccgaggcgaacgaaaaaccattcgctgaaaaagagagggttccaagccgcaactgcgttcaaaaaatatgggaccacatcatcactacagaaactagaacatgagcaaatatatccacgcaaa

SEQ ID NO: 14502 - DNA, 401 bp, Zea mays
  Clone ID: LIB3159-019-Q1-K1-H6
agctcggcagagagaagctgctgaaaacgcaggccgtcgaaacggtcgccgaagtggtcggcactggaaacggttctctccaagaaactctagctagcgagccgtctgcaaatggcgcggccaccaaacagtcgcaagaacctgagagcacagcctcagagaaatcaggccagcagtctcaataagttctcccccccaagaaatttagctagcacgagcctttggaggaaccggaagtttcttatctggagctactgaagaaggcaggaatcatgccagaaataagaaggcctgttcttcttctgttgttgtagtgtttttgtttttaaacttcgccgtatctgtagctgtttgtttcattccataggtatgaactgtttatgttcgttattaaaaatttg

SEQ ID NO: 14503 - DNA, 343 bp, Zea mays
  Clone ID: LIB3159-019-Q1-K1-H7
gcgacccacgcgtacgaggacactttattttagctgctttgttcgtggtccgcaaaaactgttagatagcgggggcataatggcaacagcagtgccgcacacattgtaatacctggctctctatgcattgtacctaaaatactgtggctctttatgaactgaagaaagatttgaaggtaatgtgagacttgtccgcatcatatgtgctcagatgatattctacctcataattacacagctgtctcatgcagaactacttctcgacgccaaagccaccttttgatgcctgaacacagactactttacttgacgtctttctatggaactattatgcaatatacag

SEQ ID NO: 14504 - DNA, 428 bp, Zea mays
  Clone ID: LIB3159-019-Q1-K1-H8
cccgcggcgacccacgcgtgcgcgagaacctcaaccaaaacctttccttagcaccgccgcgtcgctccgcgtcccgggccagctctccgctgccgtccagtgaccccgccgcgccttgcagcggcgacggaggggccagcaagtcagccatgacgacccgcatagcgccgggcgtgggcgcgaacctgctcgggcagcactcggcggagcgcaaccaggacgccaccacctacgtcggcaacctcgaccctcaggtttccgaggagcttctatgggaattatttgtccaagcaggccctgttgttaatgtgtatgtcccaaaagacagagttacaaatttacaccagggatatggatttgtagaattcaggagtgaggaagatgcagattatgccattaagattttgaacatgatcaaactatatggg

SEQ ID NO: 14505 - DNA, 380 bp, Zea mays
  Clone ID: LIB3159-019-Q1-K1-H9
cgtacgcggacgcgttgtctccgcctctcttcagctgcttcctgtagccaagcccaagcctgagcggagaccattctctaaaggttcgtgtcggcctctccaagctggccaactctatccatgccctccccgctgccgccaccacggccatctctcaagcgcccaggccccagcacatctcatctcctatattctccggccttggagcagcggctcgtgatttcagctcaagggctctatggaagggagcattcgtcgatgccttcctggctagaataaacaagaacagagaaaacatcaatgggaagaagatttggtctcgtaggtcttctattttgacggaatttgattgctccactgtgctcatttacaatgggaaa

SEQ ID NO: 14506 - DNA, 391 bp, Zea mays
  Clone ID: LIB3159-020-Q1-K1-A10
caaagctttacaaggctgcattgggcaattgttttgaagtagatgaatggggcccaatagagttctccatcatggcaaaacattttgaccggcaagggaaaccaccatatgcctaccatgctcaatatctggcacaccttctctcccatgggcagctcgatggaagcggttaaatgcaggatgtattgttggtaactgcatcaacgcaactagaatttcactatatcttgtataaaaatgttgcctttgctagaacaatgagttcagactgcaccagtttagaagttacagaactggcatcagaaacaagttctgaatttttttggtcattggctggtacgatatcagtgttgaatttgggcgatcgccgaacaatttctgaaaaaaaaca

SEQ ID NO: 14507 - DNA, 354 bp, Zea mays
  unsure (1)..(354): unsure at all n locations; Clone ID: LIB3159-020-Q1-K1-A2
accagcgnnngggaacggggccctccctcgtgttccgctccggctccagctccgtttccgcttcacctgctctttgcctcggctcgagcaagggagatgtggtttagggccgccgggctgggcacgagcgagagacgggcgtcaggcatgccgggaggggaggacgtccgtaaggtctcgcgccaggacatacagcttgtccagaatctcattgaacgttgccttcagctatatatgaaccagaaagaagtggtggacaccctatctttccaggcaaaaatagaacctagtttcactgagcttgtctggcagaagctcgaggaagagaatcgtgattttttcaaggcatactat

SEQ ID NO: 14508 - DNA, 357 bp, Zea mays
  Clone ID: LIB3159-020-Q1-K1-A3
attctccagaatgtcaacatctttacatggatattcaggaattttttgaaggtttgaacatgaaagtagaacagcaaattccattacttttggttgagaggcaggctcttaatgaagccttggaagccgagaaaaatgggcaccacctaccggaaaccagaggtctatgcctttctgaggagcaagttgttagaacgatcttaaaaagaccacagattggaccaggaaacagaatcttagatatgattataggaccatacaagctgtctcggcggagtgaagtgactgcaatccttatattatatggtctgccaagattacaaactggttccattctttgccatgagatgatgcatg

SEQ ID NO: 14509 - DNA, 340 bp, Zea mays
  unsure (1)..(340): unsure at all n locations; Clone ID: LIB3159-020-Q1-K1-A4
cggaancccggtcgaccacgcgtcgaagcagatcgtcgacgagatcgtgccgacctcggacggcaacctgtgggactacctgccggtgctgcggtggctcgacgtgttcggcgtgaggaacaagatcacggccgctgtgggcaggagggacgcgttcctgcggcggctcatcgacgcggagcggcggaggctggacgacggcggcggcgacagcgacagcgacaagaagagcatgatagccgtgctgctctcgttgcagaagtcagagccggaggtgtacacggataccatgatcatggcactttgcgggaacttatttggcgccggaacggagaccacg

SEQ ID NO: 14510 - DNA, 156 bp, Zea mays
  Clone ID: LIB3159-020-Q1-K1-A5
cggacgcgtggggcgtctcctccaggtctcctcggccgagccccgcaccccctcgcggcctagccgtggccggtcggcaccctaccgcgcccagctccgctggcgctgtggctgctgccggcgggttcggcggacgcaccacacggttgtgctccg

SEQ ID NO: 14511 - DNA, 257 bp, Zea mays
  Clone ID: LIB3159-020-Q1-K1-A6
attttgggtcgaacaacgcgtccgtttgtctaccgtcgctgcgctagccctcctccttgcttctggctttggcctgagcctgcagcctgctgcaagctttggctttggtttaggtgcttcttttccacccctttactgttccccccacttttgcttgctttgtcacgcacacgaaaagctcctgcctttaccttatctccgcacccgtagtgggatttgggggagctgcgctgctcgccccttgcgtttctttgctc

SEQ ID NO: 14512 - DNA, 162 bp, Zea mays
  Clone ID: LIB3159-020-Q1-K1-A8
atgttcagatggagcttcagctccgtttgcgcttcacctgctatttgcctcagctcgagcaggggagattcggtttagggccgccgacctgaacacgagcgatagacgcgcgtgagacatgctcctaggggaggacatccgtaaggtctcgcgccaggacat

SEQ ID NO: 14513 - DNA, 318 bp, Zea mays
  unsure (1)..(318): unsure at all n locations; Clone ID: LIB3159-020-Q1-K1-A9
accaaggagagtacgtggaggagcatccatggcttcatcggtggccgccgcggcgagcacattcctgggcacccgcctggcggacccggcgccacanaacgggcgcatcgtggcccggttcgggttcgggttgggcggcaaggcgaagcctgctccgaagaaggtggcgaagacatcgacctcctctgaccggccgctgtggttccccggcgccgtggcgcccgactacctggacggctcgctggtcggcgactaccggttcgacccgttcggtctcgggaagcccgtggagtacctgcagttcgagttggactcgct

SEQ ID NO: 14514 - DNA, 371 bp, Zea mays
  Clone ID: LIB3159-020-Q1-K1-B1
aggaaagcacgccatactcttcattctctgccacctcttgatgacttcgaagctcaagagtacacgtatctccacctcgtgctttcgcacaatggggttcgacgtggcggctcaaccgtcttcttagatcaccatctcggtggagacggttgaagtcttcacaccctctcgacctctttgctgtctcattttttttaactgtcaaggataagcaagtgacctctgtgtgcataccaccaccaccatacgtagcatacacaggcacagatggcagagcataaagggaacgttctcttgcacaagtatgagatggggaaattgcttggccaaggcacctttgccaaggtttaccatgctcgtaacacggcgac

SEQ ID NO: 14515 - DNA, 331 bp, Zea mays
  Clone ID: LIB3159-020-Q1-K1-B12
cgcaggagcaccaggacctcgccctggaagcggcgcaggacggcatcgtcttgctcaagaacgacggcggcgccggcgcgctcccgctgtccaagcccaacgtcgcgtccctcgccgtgatcgggttcaacgcgaacgacgccatcaggctgcgcggcaactacttcggcccgccgtgcgtgacggtgacgccgctccaggtgctgcagggctacgtgaaggacacgagcttcgtcgccggctgcaactcggccgcctgcaacgtcacgacgatccccgaggcggtccaggcggcgagctcgggggactccgtcgtcttgttcatggggct

SEQ ID NO: 14516 - DNA, 458 bp, Zea mays
  unsure (1)..(458): unsure at all n locations; Clone ID: LIB3159-020-Q1-K1-B3
cgcgncggctgtgtagaacactgggttcaagtattggttgaaagtttgactgatttggtgagggcgcttgaggaagctgatgtgacagttgagataaggttaaagattgatcagaatcatgcagatttgaaaggagggtccttccgtgactatggagaatccgtcttgagacatttagagaatgcaatcagcaaagacccaaatctccgtaaagccccggtgaaccatgagggcgtaagggtttcaggatatggtgggtggttcttgctgaggctctctctgcatgatcctgttcttcccctaaacattgaggcacagagtaacgatgatgcgattaagctggggcttgcggttcttgctgctgtgaatgaatttccagcactggatgtgacggcactgaacaaattcgtgcataagtgaatataagggacggacattggcatcataatgtgatcagc

SEQ ID NO: 14517 - DNA, 265 bp, Zea mays
  Clone ID: LIB3159-020-Q1-K1-B7
gcctccgtccaggtgcagcgtctgttcgtgccctccgacgacgccgacccgctgctggccaactggaccaagtacgagggcaacccggttctgtacccgcccccgggcatcggtcccaaggacttccgcgaccccaccacggcctggatcgacccctcggacggagcatggcgcgtcgtcatcggctccaaggacgacgacggccacgcgggcatcgacgtcgtctaccgcaccacggacctggtgcacttcgagctcctctcgg

SEQ ID NO: 14518 - DNA, 255 bp, Zea mays
  Clone ID: LIB3159-020-Q1-K1-B8
gttagtcagttgacacaggaatggttctaagatacaactcctctgaagtcatatcgggtcaagacctaacagtctatggtgccctttcctctcttgcttcttttgaccgttcatacctgaagagcactttcactgacaatatcaactttcgcaactatctgcatcttgtgcctgaagtacagcagctggttactgatctatatgcaactcgttatcgatcttgcctcgcatcatcttgaaaagctaaaacctaac

SEQ ID NO: 14519 - DNA, 373 bp, Zea mays
  Clone ID: LIB3159-020-Q1-K1-C1
gccagcacctcccctgttccctctctgtctctggctctctctcctctacgcccctttttatcggccgatctcacacattttggaaagaggagagagagagggagagattagagggagcgccctgcccaagcaaagagaaaccgcggcgcgagaagagggaggaagggcagacgggcgagcaggatgagagagatcatcagcatccacatcggccaggccgggatccaggtcggcaacgcctgctgggagctctactgcctcgagcacggcatcgagcccgatggcaccatgcccagtgatacctcggttggcgtcgcacatgatgccttcaacacgttcttcagcgagaccggatctggcaagcatgtgccga

SEQ ID NO: 14520 - DNA, 218 bp, Zea mays
  Clone ID: LIB3159-020-Q1-K1-C11
gggacgccctggcaaggaagctgtcttgacacttcctgctgaacgatacaggattggacattgggagacacccaaagatcctgcaaaagtacaatataacaaggaaactagaagtgtcgaacaggacccacccagagatcctgcagaggtacaacataacaaggaagctagaagtgtagaacaggacccacacatatatcctgtccaagtccaacata

SEQ ID NO: 14521 - DNA, 402 bp, Zea mays
  Clone ID: LIB3159-020-Q1-K1-C12
attttgttattccagaaatcttcaagtatctaaacaaggtggttgtgttggatgacgatgtagttgttcaacgtgatctgtctttcttgtggcatattgatatgggagacaaggtaaatggcgctgccgagttttgcgatctgaaacttggtgaaatgaaaaatgtcttgggtaaaacagcatatgatcccgagtcgtgtgtatggatgtcgggggtgaatttgattaatttggataaatggagggagcataatgtcacagagaactatctgttgctcatgcaaaagttcgaattcaaggatgagctgtccctgcgagcaacagcatttcctctgagcttgctatccttccaacatctaatatatcccctaaatgaaaaattgaccctggctggacttggat

SEQ ID NO: 14522 - DNA, 404 bp, Zea mays
  Clone ID: LIB3159-020-Q1-K1-C2
ccctacctctccagcatcctcccgtctccgtcgtctcgtctccgctcctcacctcgccagccatgggcaagatcaagatcggaatcaacggtttcggaaggatcggcaggctcgtggccagggtcgccctgcagagcgaggatgtcgagctcgtcgccgtcaacgaccccttcatcaccacggattacatgacgtacatgttcaagtacgacaccgtgcacggccaatggaagcacagcgacatcgccctcaaggactccaagacgcttctcttcggcgagaagccggtcaccgtctttggcatcaggaaccccgaggagatcccgtggggtgaggctggtgctgagtatgtcgtggagtccaccggtgtcttcactgacaaggacaaggctgctgcacatctg

SEQ ID NO: 14523 - DNA, 391 bp, Zea mays
  unsure (1)..(391): unsure at all n locations; Clone ID: LIB3159-020-Q1-K1-C3
gaccacgcgtncgggtggaggcaagtccactggcttcggcctcatctacgataacctcgagtctgccaagaagttcgagcccaaataccgcctcatcaggaatggtcttgctactaaggttgagaagtcccgcaagcaaatgaaagagcggaagaacagggccaagaagatccgtggtgtcaagaagaccaaggctggtgacgccaagaagaagtaaacagtcatttatatttctgtattactgtcctgaactctgggtggtcgtctagttgcaatgtcataattatggtcgtgttaggttttgttccgcactcagcagtaagtgaagttttgtaattcctggatgtgaacctacccggattggctgtagcatgttgtgagatgagaaggc

SEQ ID NO: 14524 - DNA, 271 bp, Zea mays
  Clone ID: LIB3159-020-Q1-K1-C4
ggcttaaaactcctgttaataatgccttaagatatgccattttgtctgtcagtgatctaaatggggttatggttgtgggtggatccacccgaatccctgcagttcaagaacttgtgaggaagcttaccgacaaagatcccaatgttacggtcaaccctgatgaggttgtttctcttggggcagctgtgcagggtggggttttggcaggagacgtgaaagatgtagttcttctggatgttactccattatctcttggtttggagacatttgg

SEQ ID NO: 14525 - DNA, 274 bp, Zea mays
  Clone ID: LIB3159-020-Q1-K1-C5
ggttgagcaaagtctagctagtgaaaaataaggctctagctcatcacgggcgacggctgcctcggccttccggactgataagccagactcccataacagctctgataatcatatatggcttgacccccgcggaagtggaagtgcacacaatcttcatgcagatgatctaatcacatgtacaagatatccactggtacttgtaattgatagtgaaaatacccatgcattcaatgtcatacatactgtacagaagggagaaccacctgctgtatta

SEQ ID NO: 14526 - DNA, 340 bp, Zea mays
  unsure (1)..(340): unsure at all n locations; Clone ID: LIB3159-020-Q1-K1-C6
gaaaattggagcagtaaggccattgattccactttccctgagttcggnggcacaaagatgtctgacagtatgcaaagaaagtgcaaaaatgtgataagcaagctttggaggaggattgacaaagaaggtcatcaaatgatacctaacatatcttcttggtggcggaggaatgagaattcgtcgttcagaggtccggctggtagcacacttgacctacaaaaaatcgagcaacgagtcgatgggttggagtacggcgctgtaaccgagttcatagcggacatgcagcaaatgttgaaaagcgtggtccaacacttcagctataggcatgaagtccggatag

SEQ ID NO: 14527 - DNA, 315 bp, Zea mays
  Clone ID: LIB3159-020-Q1-K1-C9
cgtgcgaggatggctgggatggcatcgctgcttggcgccatggcgtcgctctccatctccgcgctaggggcggctacggcaagcagcagcagcttctggggcaaccggctcgccacctactccgcgccgcagactggggtaaggcttatggccaagatatgcccaattgaaatgagacttaagagatgggagcgaaagaagtgtaaaccaaacagtctttctgtgctgcacaagatgcatgctaggaccggggacaccgtacaggttattgcacgcccggagacaggaaaggctggagaagtcacacgcctttcc

SEQ ID NO: 14528 - DNA, 359 bp, Zea mays
  Clone ID: LIB3159-020-Q1-K1-D1
tcccgggcgccacgcgtcgatcgatctgaagtctcgctacgtacaggcaataaaaaaagcgccgcatggcagcagaccatggccctctcctccacggccttcgccggcaaggccgtgaacgtgccgtcgtcgtccgccttcggcgaggcccgcgtgacgatgcgcaagacggcggcgaaggccaagccagcggcggcgtccgggagcccgtggtacggccccgaccgcgtgctgtacctgggcccactgtccggcgagccgccgagctacctgacgggcgagttcccgggcgactacggctgggacaccgcggggctgtcggcggacccggagacgttcgccaagaaccgggaggctga

SEQ ID NO: 14529 - DNA, 268 bp, Zea mays
  Clone ID: LIB3159-020-Q1-K1-D11
gacccacgcgtacggatcgagtagcccaccaccccacccttcgactctaaccgacgcaatggcgacgctgagcgttccttcctccgtcccggccgtcgccgatgactgctagcagctccacaaggctttcgaaggttggggcaccaacgagaagctgatcatctccatcctggcccaccgcaacgccgcgcagcgccgcgcgatccgccgcggctacgccgaggcgtacgggaaggagctgctccgcgctctccgcgacgagatccac

SEQ ID NO: 14530 - DNA, 409 bp, Zea mays
  Clone ID: LIB3159-020-Q1-K1-D2
gcctggtctctcctcgacaacttcgagtggctggcagggtactcgtccaagttcggcatcgtggacgtggacttcaacacgctcgaacgccacccgaaggcgtcggcctactggttcagggacatgcttcagaagcattgagatctccagagccgagcctgagcacggaaggtaccattttgttcagcttcgcctagtgtttgggatggcccaatggttcaaatccggctcagtgcctggctaccaaaatgggaacaaaggacagctaccccgatcaattgtgatgttgtgtgtttgtgggtatgttctctctggagtttgagctgtggttattttatcgtgttggttgatcgtgtttgaaatgcttaattcaagactgtgacaaaaaaaaaaaaaaatataattaaat

SEQ ID NO: 14531 - DNA, 401 bp, Zea mays
  Clone ID: LIB3159-020-Q1-K1-D3
caactttgatgagtcccttattcttggtgtgggtggatttggtaaagtttatcgtggtgaggttgatgggggaacaactaaggtggctatcaagcgtggcaaccccttgtctgagcagggtgtgcatgagttccagactgagattgaaatgctgtccaagctccgccaccgccatctggtgtcactgattgggtactgcgaggagaagaatgaaatgatcctggtctacgattacatggcccatggtactctccgtgagcacctgtacaagacccagaagccacctcttacctggaggcagcgtttggatatctgtattggtgcagctcgtgggcttcactaccttcacactggtgcaaagcacaccatcattcaccgtgatgtgaagacaacaaacatct

SEQ ID NO: 14532 - DNA, 367 bp, Zea mays
  unsure (1)..(367): unsure at all n locations; Clone ID: LIB3159-020-Q1-K1-D4
gaccacgcgtncgagcgaggataacccggaagaagatgaagaagctgagattggcatgtgggaggcagtaacatggcttgcggtgttaacaattctgggtgtcttttctttctgagtacctagttaacgccattgagggagcatctgattcattgaacctaccggtggcttttatcagtgttattttgcttcctattgtgggcaatgcagctgaacatgcaagcgcaataatgtttgccatgaaagataagcttgacataacacttggtgttgcaattggttcatcaacacagatatcaatgtttgtgattccattttgtgttgntattggttggacgatgggacaaaagatggacttgaattttca

SEQ ID NO: 14533 - DNA, 302 bp, Zea mays
  unsure (1)..(302): unsure at all n locations; Clone ID: LIB3159-020-Q1-K1-D5
cgtncgatcacactcgtagagagaaggaaaaatatccccaaaccctagctcccgatctcgatggcgaaccctcgcgtcttcttcgacatgaccgtcggcggcgccccggcgggccggatcgtgatggagctgtacgccaacgaggtgcccaagaccgcggagaacttccgcgcgctgtgcacgggcgagaagggcgtgggcaagtccgggaagccgctccactacaagggctccaccttccaccgcgtcatccccgagttcatgtgccagggcggcgacttcacccgcggcaacggcaccgg

SEQ ID NO: 14534 - DNA, 321 bp, Zea mays
  Clone ID: LIB3159-020-Q1-K1-D7
gtcacctgcctatctatctagcgagtgagagagtaggaaagctcgctagctagcatggagtgcggcagcaagaacgcagcaggcggtgtgttggcgctgctgcttctccagctggtgttagctccgacgacggcgacggcccgcctcctgcaggcggatacctccaccgtggttggcctggacatcatcccgagggagtttggccatccagcgagaggcatcctctgtggtgaaacctgtgtcttcctaccatgctatccggcagtcatgggttgccaatgcatcggccacatccgcacgatgtgatatctggactagcgc

SEQ ID NO: 14535 - DNA, 162 bp, Zea mays
  Clone ID: LIB3159-020-Q1-K1-D8
cgtgcgtaccttcctgatcctgccttacaactgtcagtttaaaagacgggggaaaaccttgagctgggggtatactgaaatagagggctagactctcaattctcacttgcttcctcaagttctgtctgtatatacgatcatcttcacagtgtcaaaagactc

SEQ ID NO: 14536 - DNA, 359 bp, Zea mays
  Clone ID: LIB3159-020-Q1-K1-E1
tccttatatgagcaggggcgctactactttgcatgggtttctgcaagacggtcaccagcaggacatgagctcagcaactgagcagagctccatgaccgcatcaagcctgatgaacccttcatccaataacctagccctggcgctgcaaggtcaccaccaccaccaccaggagcatgagcaccagcagcagatgctgtccagcttcggatccgagctgctcttgtcgccgacgacctcaccctacgggttccagtcctctctgctacgaagcctcatggagccggccgcggcgacgaagcatgcttttgccgggtaccagcagcagcagtatgatcagtaccagcagcagatgggcatgg

SEQ ID NO: 14537 - DNA, 350 bp, Zea mays
  unsure (1)..(350): unsure at all n locations; Clone ID: LIB3159-020-Q1-K1-E12
gacgagaagcagggagtgattcctgtaagcagtacatgaggagggcgacttggagggaggtcctagaggtagtaagtcacttgtttactccatgatgacaatagcaagcagatcgcggtggtgcctatggatgctacaacaagaaagatcaaaagttcttttggatggatgcagctagatattttgttttgtattttctccaaaagagaaatttgcaacgttgtgagtgatattataattgtgatgcttttgtgaatatataattgtggtgcttttgtgtttnaaaaaaaaaaaaataaaataaaaaaaatatataaattntattttaattttattaaataataaaaatt

SEQ ID NO: 14538 - DNA, 299 bp, Zea mays
  unsure (1)..(299): unsure at all n locations; Clone ID: LIB3159-020-Q1-K1-E4
cgtccgggcaaacgcggctgcaagcgcggcgcccctcttccactcttcagcagccgccagcccgcacaggcctccctcgcgcgctcagggtgtgcggaatggaagccgangcggcggccaagaggacgcgggacagcggggaggacgccgccgcggcggggatctccgccgtcatcccgggatggttctccgagatcagccccatgtggcccggtgaggcgcactctttgaaggtggacaaggtgctgttccaagggaagtcagactaccaaagcggtatggtctttcagtcctctacg

SEQ ID NO: 14539 - DNA, 449 bp, Zea mays
  Clone ID: LIB3159-020-Q1-K1-E5
tagaagacatggttcaaccagtccgcccgcaagcttaggcgccgcatcgctcgtcaaaagaagggtgtgaagatattcccccgcccgactgctggtcctctacgccccattgttcaatgccagactttaaagtacaacatgaagtcaagggctgggagaggctttacccttgaggagctgaaagctgctggcatcccaaaaaagcttgctccaaccattggtatttctgttgatcaccgccgcaagaacaaatcccttgagggactgcaagccaatgttcaaaagcttaaaacatacaaagccaaacttggtatcttcccaaggcgtgcacaccaggttaaagctggggactctacttcagaggaagcttgcaccgctacccaagttcaaggtgactacatgccatttacttctggtgagaaacgttcagttgagggtgtgaaagtcac

SEQ ID NO: 14540 - DNA, 233 bp, Zea mays
  unsure (1)..(233): unsure at all n locations; Clone ID: LIB3159-020-Q1-K1-E7
caacaagnatatcaggaaggtccggtatttaaaacgccctgctaatgcaccctacctgttacaaatttattattattcaaaaccaccgccatgtggacaccacgtcgatgcagccttttggccccatcaaccaagctggagcagatgagatccagttgagggacgcctcctcactcccccccaaagagggcacgcataatatcctcataatctctaattgatctttggccaca

SEQ ID NO: 14541 - DNA, 177 bp, Zea mays
  unsure (1)..(177): unsure at all n locations; Clone ID: LIB3159-020-Q1-K1-F11
caggcgccgatctatagactatggccgccgcgggctcctcgcgggccttgtgctacatagagtaagggactggaaaanaacatctccctcntcactggtggcgccaccggcatcggcaaggccatcgttcgcctcttcatggatcacggcgccaaagtctgcatcgcggaccattca

SEQ ID NO: 14542 - DNA, 405 bp, Zea mays
  unsure (1)..(405): unsure at all n locations; Clone ID: LIB3159-020-Q1-K1-F2
gtccgggctgggtctgctctcgtccttccggaggccgcggcccaacatggcgaagatcaagccgaaggccttgctcgcgcanagcaaggtgaagaaggtccccggccaaatcagcgtggccacgatcgtcacctacatgatcctcggcgtcctggttgtgtcctccgtttacgctgcctacaggtactgctgggcaggcacaggagcagcggaggcagtgggcgcccaggggaactgatcccccttccgactgcgtggctgatctcgctgttgttgtatcatccggttggggtaaaatttttggttgttgctgtctagcaaatggggttcatgggacatggataggttgtattgtgatacggntacaccgtaaccgatgatatgtattgtgaatttcttcccttt

SEQ ID NO: 14543 - DNA, 237 bp, Zea mays
  Clone ID: LIB3159-020-Q1-K1-F5
cgcgtacgagaaaaatagggtttcagtgtcggcagcctcttctcacgctggcgtcacctccgagccccacgtgccgagccagacaaccaccgggcccagatccatatccacctgttctggatctcacagccttcgcttatgctgttctttatgttcgccaccgcgatgtcttgggacgggtactgcggacagatctaccctggaagcgttgttccatcgacctgaaacgacccccct

SEQ ID NO: 14544 - DNA, 275 bp, Zea mays
  unsure (1)..(275): unsure at all n locations; Clone ID: LIB3159-020-Q1-K1-F6
gtttccttcccggtcttgctgcctaaagcctctctttctgccattcgatcccgtcgtcagtccccgcccggcgtgccgcagacttccacgagggtggcctctactcggaccaacnnctgctggatagaaagaaggatagcggttaaaagccctcgtccccggcttgcgaagcgcttgcttgccgtgcggtctgctattgtgaccgtgcgcttatccccctaccgagctttcattgcatgtacccacgcnncctctttccttcttcnngcagtctt

SEQ ID NO: 14545 - DNA, 393 bp, Zea mays
  Clone ID: LIB3159-020-Q1-K1-F7
gattttcacacgaggatatattgacagaggtggatcttttgagttcaagaaaaccaggggatgtgatcttacctgtactcggtccttataatataggatacacctcaaacggccgctacatgctagtaggcggacgaaaaggccaccttgcaatgatggatatgctgcatatggatcttatcaaggagtttgacgtgagggaaactgttcgtgacgtgacattcttacacaatgagcagttgtatgccggcgctcaaaaaaagtatccctacatctataaccgacatggtacacaaatacactgtctgaatgaacatggactagcactgaaccctccaatttctagttaaacaactcctcttagcattcataaacaggttcgggcagatccac

SEQ ID NO: 14546 - DNA, 122 bp, Zea mays
  unsure (1)..(122): unsure at all n locations; Clone ID: LIB3159-020-Q1-K1-F8
catataacctcatacattntatttatatttttagcccgcaccaaaacaaatgcgaatttgtttatatactaatggggccgggcaaaatcttactcccatacggtgcaatcataattcttgac

SEQ ID NO: 14547 - DNA, 301 bp, Zea mays
  unsure (1)..(301): unsure at all n locations; Clone ID: LIB3159-020-Q1-K1-G10
acaatggcaccagaaacgatgctcctcggcgtctgtgccgtgctgatggtggtcggcgtcacgaacgcggcggagggccaggtggcgtcggtcgtcgtgggcctggcgaggtgcgccgacagcacgaggaagaacatgaaggctgaggccggtttcaagggtcttcaggtggcgatcaagtgcaagaacagcaacggcgagtacgagacaaaggccgtgagtgagatccaaagctccggagccttcagcgtnccactcgccgncgacctccacggggccgactgccacgcgcagcttcaca

SEQ ID NO: 14548 - DNA, 348 bp, Zea mays
  Clone ID: LIB3159-020-Q1-K1-G11
aaaagggtccaaagggtgatgagaagtatcttgggatggttaacatgattggtacccacttcgaggaaaaccatgtcgctactggatttggaaatcatatggcaatcccgatactccgtgctgaatggcgcgatgatatgacttttgaagaagctgttaagctggttgagaagtgcttggtggtcttgctgtaccgagacagatcatctatcaacaaattccagattgccaagatcacaagtgaaggatcaaccatctacccaccatattccttgaagacctactggggcttcactcacttcgaaaacccaacccagggcgcttggggatcatggtagatttatgctc

SEQ ID NO: 14549 - DNA, 305 bp, Zea mays
  Clone ID: LIB3159-020-Q1-K1-G12
gccctgcatagaagcatcaggtatcgggttccgagccgctgaaggttgtcgcgtttctagacactccgacgtgtgggccatgatacctctaaggactatggttttggggcgaggtactagcgttagtttttcctgcgaccccttattcctatatatagcgtcttgtgtctgggggctccaaccgacgttagtgtgggccctcccgatcaagggccctattaaaggaacgattgttgggttaagcccaatccattctctattgaccgtctgtataagacacacccaacacttctgtctttcttgtc

SEQ ID NO: 14550 - DNA, 318 bp, Zea mays
  Clone ID: LIB3159-020-Q1-K1-G2
gtcaaactcgccttccttctgatgcccaaatctctctgggattgggatctccagttgcccgacgcccttccatgacacgcgaaatgcacgccatcctcgctgggattccgcagtccctccggcccgcggtgctgatcgcctcgacgtgcgcgctgctcctcctcgccaccgcgctactccttccgcgcgctcctccggcggcgccggcggcggcgctgaccactgtcaccgacgcggacgccgtccgcttggacgctagcgtcacccgaaggaacggcaacgaagtgctgtggcagctacccgccccgtcgtccccac

SEQ ID NO: 14551 - DNA, 389 bp, Zea mays
  unsure (1)..(389): unsure at all n locations; Clone ID: LIB3159-020-Q1-K1-G3
cgggtccgacccacgccgtcncggaccccttacgtccttcgcttcgtcgccgccgtccgtctgtcgtcgtttacgtccccgcacctcgctttcattgtcgtggtcgcccaagatgaccgaagtcgcactaagaagggcaggaattgtttnggcaatatatggaacccaggtatnnggtgctagcttgcgtaagccaaatcaagaaagatggaagggtatctcatgcattccaagtaccttttgcgaagttctgtgggaaagtttggctgtgaaagaggaaaagcaagttggaaatttgtggggtgcaaaggacctgtgggaaaggtgaaagggctggtggtgctttacanccatgatacactgctagttgcggtcatccgtcagggagc

SEQ ID NO: 14552 - DNA, 227 bp, Zea mays
  Clone ID: LIB3159-020-Q1-K1-G6
acaatggcaccagaaacgatgctcctcggcgtctgtgccgtgctgatggtggtcggcgtcacgaacgcggcggatggccacgtggcgtctgtcgtcgtgggcctggcgaggtgcgccgacagctcgaggaagaacatgaaggctgaggccggtttcaagggtcttcaggtggcgatcaagtgcaagaacagcaacggcgagtacgagacaaacgccgtgagtgagat

SEQ ID NO: 14553 - DNA, 72 bp, Zea mays
  unsure (1)..(72): unsure at all n locations; Clone ID: LIB3159-020-Q1-K1-G7
acccacgcgtcacgtatgatctactacttggncatattcctgtattaaattatttcacacatgcagttttgc

SEQ ID NO: 14554 - DNA, 301 bp, Zea mays
  unsure (1)..(301): unsure at all n locations; Clone ID: LIB3159-020-Q1-K1-G9
agggggcgagccacgcgtncggaaggcgaccattccttcttcgctccttcgccttcgctatggntaagtactcgcaggagccgggcaaccctaccaaaggggccaaggccatggaaagggacctgagggtccacttcaagaacacatgggagacagcttttgcgcttcgcaagctgcctttgaccaatgctaagcgataccttgaggatgttattgctcacaagcaggcaattcccttccggaaatactgcggaggtgttggtcgcaccgcacaagcaaagtctcgccactccaatggggc

SEQ ID NO: 14555 - DNA, 303 bp, Zea mays
  unsure (1)..(303): unsure at all n locations; Clone ID: LIB3159-020-Q1-K1-H1
ggcagccaataaggtaaggggtgacgaanatggctccaacgaccgccaccaaagacgacagtggctacggcgactagcgccggcgcgagctgcaagcgttcgacgacacgaagctgggggtgaaaggtctggtggactccggcgtcaagtccatcccgtccatcttccaccacccgccggaagccctgagcgacataatttctccggcgcctctgccgtcgtcgccaccctccggcgccgccatcccggtggtggacctctcggtgacgcggcgcgaggacctattctagcaggtgaggcacg

SEQ ID NO: 14556 - DNA, 290 bp, Zea mays
  Clone ID: LIB3159-020-Q1-K1-H10
accgaaccgagcgcaccatgtcgtctgcggctggaggagtggaggagacggtgcgggcgtcgcacatcctcatcaagcacgagggttcccgccgcaaggcctcctggaaggaccctgacggccgcatcatctccgccaccacgcgcggcgacgccgcagcgcgcctcctggacctccgcaaccagattctctccggccaggccaacttcgccgacctcgccgctcggcactccgactgctcgtccgcgcgacgcggtggggacttaagtacctttgggaaggagcagatg

SEQ ID NO: 14557 - DNA, 255 bp, Zea mays
  Clone ID: LIB3159-020-Q1-K1-H11
ggccgccgcgaaggcgacggggaaggaggagctgctgccccgccggccgcagttcccgctagcctccgtggcgggcgtgctgcagcggcggatccacgcgcggtacgacgacctcgcgcgggccagcgaggcgcagtgcctcaccatcgagcaggttaacgagtttcttaactgtctcgtagatgctagaaacgagctgctgcagaggtacgagaatgtacaaagaagcttcaaaataaaaaaggcgatgctatc

SEQ ID NO: 14558 - DNA, 296 bp, Zea mays
  Clone ID: LIB3159-020-Q1-K1-H2
cggttctacaggtctggacatgtctatatctgcttaaaaattcgagggagcagcggaatcttcagcatgctctctcttttctgtcagccggcgcttgtggactgcctgattctgtacatcaaacatcttgcattatccaattcaatggtgccagcgagaacagcagtgaccttcatgtaacgcatggcaggaactctggtccagcatcatgcgccgatgcgcagcatatagctgcccagcctcagtctcagctggttcattttaccacagataccggcaatactgtttatgagccc

SEQ ID NO: 14559 - DNA, 97 bp, Zea mays
  Clone ID: LIB3159-020-Q1-K1-H4
gtacttcatgagcgaagattgtgactctatcgtgcgaagattggcacaaaaaactgttgcgctgacaaactcctagacactatacgacgaaccctcc

SEQ ID NO: 14560 - DNA, 256 bp, Zea mays
  Clone ID: LIB3159-020-Q1-K1-H5
actcatccttgcttttgcgtttgcaatagttgctttacatcctcaggtccatggaagcgttatgcctgcttctgtcatttctgtttactgcgcatacctgtgctacacgagtctctcgagtgaaccggatgactatgagtgcaatgggcttcacaggcattctaagcaggtttcaatgagtgctcttatactcgggatgctcactacggtgctctctgttgtgtactcagcagtccgtgctgggacctcgactaca

SEQ ID NO: 14561 - DNA, 377 bp, Zea mays
  unsure (1)..(377): unsure at all n locations; Clone ID: LIB3159-020-Q1-K1-H7
aggcaatttaggttcaggttgtccatttccacaacataaagnttctctagggtaagtgtgaaacataaagtggggagggcatttctaatccttattatcacaatcttaaatattatcattatcaacttaaatacaaccaactgataactcatattaccatttcttattattctgcgaatcatttattcatcctcaaaccaccatatctatttacacaacatcctatatttaaaatccttttattttcatttgtcaattcacaacattataatcccacctattataattaaacttctctcaatttaacccccataacttatacttttcttaatcccttcccccttttttaacccatttttttaaccctacaataaaaa

SEQ ID NO: 14562 - DNA, 243 bp, Zea mays
  Clone ID: LIB3159-021-Q1-K1-A1
caagcctcgtctacacaaggaccgcgcctacatttacttcgaagataatgctggagtgagggtgcatcccaagggtgagaggaaaggttctgcaatcactggacctatcggcaaggagtgtgctgacctttgacctaggatcgctagtgcatcacatgccatcgtttgagagcttgttggaacgtgtttacactcgagtatgatcatctcaattgtgtcgtgcagctggtgtaaggatgctat

SEQ ID NO: 14563 - DNA, 458 bp, Zea mays
  Clone ID: LIB3159-021-Q1-K1-A10
gcgcgagcgcgtaaggcacgcttcttaggctgttctatgacgagatccacagcaaaacgtggatggtggtgaagggcgcgggcactgctaaccaatgcccgaccatcgacggcggcgtggagtcgttcccgttcaaggccggctagtaccatatgaagaagctgtgcctggagccgacgtgcttcaccgtcaaggcggagggcatcgccatgaacgccccgcccgagttccagaagaccaagctcatgacccgccttacgtacacgctggacgagatcgtgggcccgctcgaggtcggctcctacggcacgctcaagttcgaggagaaggacggcatcgactacgccgccgtcaccgtgcagatcctggggtgcgagcgcgtgctgttcctcttcaccgtcaagcagctcgtctccaccggcaagcccgatagcttctgcggtcccttactcgtgccc

SEQ ID NO: 14564 - DNA, 473 bp, Zea mays
  unsure (1)..(473): unsure at all n locations; Clone ID: LIB3159-021-Q1-K1-A2
gtgcgagcggaggaggcgaccgaagcgccacttgcttgagtagcgaagcgcgagagcaatggcgtcgctgtcgtgcgcctgcacgctgccctggacccccgcctcctacccgcggccctcggcggggcgctgcctcacggcctctcgccgggctccgtcgctggtcatcgtcgcccaggggaaggtcaagaagtaccgccaggtcatattgacagacgacatanaagaggtggggaagaaaggggatacactgaaggtgcgagctggattctaccgcaacttcctccttcccaagggcaaggctacacttctgaccccagaagtcctcaaggaaatgcagctggagcaggagagaatagaagctgagaagaagcgggtaaaagaagacgcgcaaacacttgctcgangttttgaaaccattggcgctntcaaactcccttcgcaaggtggaaaaggaaaacagatctttggga

SEQ ID NO: 14565 - DNA, 367 bp, Zea mays
  Clone ID: LIB3159-021-Q1-K1-A4
ggacgagctacaattacttgaaggagttccaccagtttctagaagttgtaaagaggtaaatgactttgttggtactaaacaagacccactaataccgataacgaagaagacacacagatcatgccgtcttttttggtggatcaggtttgcattccattacttattcctgccattgatcgcatggtgggtgcatcaaaatcttgataatattttgttatagtttcacctaaaaaacttgtacataagatgaatcagcaaaagtttcttggagaatgcaaatttttttagataattgaagaaatatccagcttcatcctttaaagagaggaatgggaccaaaattattataagttaaaccacaacaacg

SEQ ID NO: 14566 - DNA, 467 bp, Zea mays
  Clone ID: LIB3159-021-Q1-K1-A5
cagcaaccaaggttatctcgagggcttcaaaagtatgttcatcagctggattcagggcatacatatttgttgcccttcttgtggatggagttgctgctctagtgctgcattatcaccgctccaatgccaacctatgaatttgaatcatggaacatcagcatgcttaaatgtagctctagtggtcagtggcagcattggcttcgtccttggagtagttcaccagcatttgcttgcattggactggaatagaaatcgagttcctcggcttatctcactgggattactggaaatacatttttgcgaccactgattcccagttatctccacttgtttttttttgtggtgctgcacatattaagttatttctctcttcttttgatcgtctagttgctaccaacgggtgcctatcgaaaatcgaaaaagagaaaaagagggaaaagggttggtcgtatgaacaaaaaagatgt

SEQ ID NO: 14567 - DNA, 319 bp, Zea mays
  Clone ID: LIB3159-021-Q1-K1-A6
gacgcggccacgacgctagtcgtcgtcgtcgtttcgcaactcgcggcgccggctgccggctgcccctactgtccgacgccgacaccgacacctacgacaacgaacacacacacagcggggaacccgccgccgtcgatcacgccgggacctccgtcttcatacttgccattcacgccaacgggcaagcgccacaaggacacgctgaatctgctggagtgcgaggacgcactcaacggcctagtgcacaccatcgaaaggaccaacgacaacgacaactgctgtacactgctgaacaaagaggcagatctatactccaaac

SEQ ID NO: 14568 - DNA, 366 bp, Zea mays
  Clone ID: LIB3159-021-Q1-K1-A7
attggaggaagatcttgaaaccctgaaggaattttttgtttctggtggagatggactgggtcgtggaactgttgaaaactgagtctcgcgtgtacgtcctgtaataaatctgatcaagcaagagacccgcgtgctcattgatgacctacgagaagttactcaaggtggcaagagcaaatttggagcggactccaaaaccctccttagggtcctgtgtcacagaaatgattcagaggcatcacattacgtgaagaagcaattcaagatacccagctcagctccgagcgcctgattgattgcgaacgaaaaaacagatatcgaacaggacactgcagccttgctcgtaacccaagaaacggtgctcca

SEQ ID NO: 14569 - DNA, 321 bp, Zea mays
  Clone ID: LIB3159-021-Q1-K1-A8
caactagtattttagtagtatcagtttcttttttttcaaggttcagtcagtgatagggcggggtaattttcgatttggggtgggcagctgccgaggatcgatggcattttagacatctgccatggcggctgtgttgtgatgcataagtaaacgtacttactaatctcctggatgagctgccggttgatttttctcacggcacggacagtcgagaaagtcagcgtaatcccctgttatgatctcctatgatgcaacttaattaattcttctggcgtatgtatgtaaccatgtgtgtacatctagaacgaatcgtgatgctga

SEQ ID NO: 14570 - DNA, 425 bp, Zea mays
  unsure (1)..(425): unsure at all n locations; Clone ID: LIB3159-021-Q1-K1-A9
cggagatggagagagccaaacaacatttacattaatttgtggtgttatccaaaatttcttgatatgtgaggaatgccgcacacacttctatgaaatgggttcaagtgtatcagtccccttgaaatcttgccgtgaccttgccctttggctatggaccgggcattacaaagtttacgagaggttgatgaaagaagaaaaggagttagacaatgctgatccttcatttcctaagatcatatggcctgcaaagcaactctgtacattgtgctaccgatcttctaggacgacggctgatggagccatgcangttgagtggaatgaagatgaagtattcaatttcttggttaactactacgggaagatgcttgtatcatcctacagggagacctacatgcagtcctttcaagtagccttaatttctgacg

SEQ ID NO: 14571 - DNA, 305 bp, Zea mays
  Clone ID: LIB3159-021-Q1-K1-B1
ttcgtggactagacaggctcgtctaagagggtgtccgttacgacatgtcgagtcaaccagtacagctgcgtacggtgctacccgacgtgaccggcgcctacgaggcaccgtacctgggcatcgaccctgccgctccccgggaactacaccatgctcgacttccgcctgtaatgcgggagatctaccgcctgccgtcccaggctcagcatgccatcaaggaggcgaacagcaactctgtggcagatgcgcccggcgccccagctgagcagatgcagcggaagccatgactgatgcttatcaaccgt

SEQ ID NO: 14572 - DNA, 460 bp, Zea mays
  Clone ID: LIB3159-021-Q1-K1-B10
atcgtttctggataaacaggccgaagaaaggtcatgggacatcaacctaggatggttcttggagccagtggttcgtggtgactaccccttctccatgagatcattggctagggaacgactacccttcttcaaggacgagcagaaggagaagctcgccggttcctataacatgttggggttaaactactacacctcacggttctccaaaaacatcgacatctcaccaaactactcacctgtgctcaacactgacgacgcctacgccagtcaagaagttaacgggcctgacgggaagcccattggtcctcctatgggaaatccatggatctacatgtaccctgagggcttgaaggatctccttatgataatgaagaacaaatacggaaacccacctatctacatcaccgagaacggaatcggggatgttgataccaaagagacacctctacccatggaggct

SEQ ID NO: 14573 - DNA, 452 bp, Zea mays
  unsure (1)..(452): unsure at all n locations; Clone ID: LIB3159-021-Q1-K1-B11
acgtngcgtgcacgcgtaccgaacttatccaccacctgaggttcttcttcctgtttcttttaacggttctgaccacctgagggaggttttttacaagcagatgggctcgaccaatcaggacattgtcgccctgtctggtgggcacaccttcgaaaggtgccacaaagagcaccctagggttctacggggcctcgactacataccctttgatctttgacaactcttacttcaacgaacttctgactggagataaagatggccttctttatatcacaagagacaaagccctgctgagagaccctgtatttcgccatcttgtcaagaaatatgctacggatgagaacgctttctttgatgactacaaagaggcccacctcatgctctcctaactgcggattgctgatgcttaactagaccctatcctggataatacattctgctgcatgtggtct

SEQ ID NO: 14574 - DNA, 324 bp, Zea mays
  Clone ID: LIB3159-021-Q1-K1-B3
gaccgacgcgtacgcacagatgctaaaatggtggttccttctgatgtttattaacacatggaactgttctcgaggaggagtctttattattgtgcgcgagttcatcacaacccattactaccaagatggcattcattctattccgggggctcgagatgctctccaaactctttcatatttatgtagcttgtctgtaccaacatctcggcaggatgtaactaaaaatcacacattgctatggattgacaactactatccatgcttatttcagcatatccattaccataatcatttctctatgaaaagtcaatccacgccaaaatc

SEQ ID NO: 14575 - DNA, 264 bp, Zea mays
  Clone ID: LIB3159-021-Q1-K1-B4
tccgcagaagtgctctgtccactactctttctcctattttttctgacaacccacgtctctatagagttgtgtacaaaaagcgtgctgcgacgatacaacaatccctcgacaattataaatctgctacttattattattcccattcactctgatagactccggcctaaaaaatgccatacctgaagctgatctattatttgttttgtaatcaaataaacgtgtgattatctggcacacaaaataaaatcttgcgtattttggaac

SEQ ID NO: 14576 - DNA, 433 bp, Zea mays
  unsure (1)..(433): unsure at all n locations; Clone ID: LIB3159-021-Q1-K1-B5
gagagccctcgaacaccaagccgctcaggtgatgactggaggtctgcctttgattgatcggcaaatgggcctgttgctacaagcacaaacagtgaatcaaggtcgagaagtgctgatggtcgcagccggcgctatgagaacggggatgtgagctcaggtgccaactctggcagccggcgcacaccgaaccggttgccaccagcaccgccaaaatactaatcgtgctgattggtattcatgaacattatgtattcttgcctggcacacgccccttgcttgtcatatgggttattggagcgtatttcagatcggccgctagagattgtgttgtagtggagtctggtgattgcgtgaacattgtgttcgcaggtcgctgcgactcagatgagttgtttatagaaatatataggtaaccatggtctcaaannaaaaa

SEQ ID NO: 14577 - DNA, 390 bp, Zea mays
  Clone ID: LIB3159-021-Q1-K1-B7
cctgccgccgctcggggtcttcttcaagttcggttgcggggttgagttctggatctgccgtatcctcaccttcttcggctgcctccccggcatcatctacgccgtctgggccatcaccaagtagccggccggtgcgttagcatgcaatgcgcgcgcagggtgatctcgtggcgggggacgcggtgtgcgcgtgtcttgagatgtgattccttccttccttgtttagttgctgctgctcctgctggtgtagtactggtgtatccagtccttttaatttcttgattagtttgctcggctgaagaaatcaggacgcgtgcctggtgttgctgctcagctccatgtacttgtacaaccgttcctccctgcagctgctgccccttctctcttttt

SEQ ID NO: 14578 - DNA, 474 bp, Zea mays
  Clone ID: LIB3159-021-Q1-K1-C1
atcgctccctgcctctggtcacctcgcttccgttcccggctcccctccggccacccacagatggtccgttcgctcgccaagagagaggaccggagaccatggcggaccagctcaccgacgaccagatcgccgagttcaaggaggccttcagcctcttcgacaaggacggcgacggttgcatcacaaccaaggagctcggaactgtcatgcgatcactgggtcagaacccaaccgaggctgagctccaggacatgatcaacgaggtcgatgcggacggcaacggcaccatcgacttcccggagttcctcaacctcatggcccgcaggatgaaggacaccgactccgaggaggagctcaaggaggcgttcagggtgttcgacaaggaccagaacggcttcatctctgcggcggagctccgccacgtgatgaccaacctcggcgagaagctgaccgacaggaggtcgatgagatgat

SEQ ID NO: 14579 - DNA, 187 bp, Zea mays
  Clone ID: LIB3159-021-Q1-K1-C10
gtctcttatattgtacccaccccttttttctacacctaggctactttcttccgtcgcatttcaaagaggcgtgcgcactctctataccctatcacatagagaaactcatctcatcctaacccttcatactactacacaaccagtaacgccgcccacatgcccccaacattaaaaaacaaattcattc

SEQ ID NO: 14580 - DNA, 397 bp, Zea mays
  unsure (1)..(397): unsure at all n locations; Clone ID: LIB3159-021-Q1-K1-C3
accgacgcgaacgattncacaagaaaatgcctcttcattcaatagatcttttctcccgncttcttcagtattggccggatctgcgatgtagcgggctggacgcctatgctcattcattctttgacgaattacgagaatcacatgcaagactccctaatggacgcccatttcctccactattcaactttaagcaggaactagcaaacgcaccaccggagcttgtcagcaggctattaccagagcatgctcgacggcattcaggattcggttccttatttgggagtggaccgtagcccgtaggaaaatctcgttttaatgttgggctgctgtacgccgtcagagggcaatctgcatatcccaaatctaagttttagaacctgaccatcttgttgagaag

SEQ ID NO: 14581 - DNA, 296 bp, Zea mays
  Clone ID: LIB3159-021-Q1-K1-C5
cgacccacgcgtacgcttcgacatccgatgcctcattagctcgtttttttggcattggctctccccctcgggcggctcgtacccaactgccagggccagccttaaacccacctacgctttcggaaacgacacgtctccttcgccgctcacgccagttctcgcgccgccttcgctgcctgcacggaggaccatgccctacaaaaccacacacccgaggctgatgccgaggctgatacagacaaacaagtgggccctaaaacacgcctcgtcttacataacatcccgcgggactgcac

SEQ ID NO: 14582 - DNA, 333 bp, Zea mays
  unsure (1)..(333): unsure at all n locations; Clone ID: LIB3159-021-Q1-K1-C6
gaattttcttgtaagtccctgtagtgcttagccagttgtaacttaaagagttctgtttagggtggcttcttgcggccacaatcatgtagcagaatgtgcgtgtgtttcaggttagcgtgggggtatgtgcatctgtccaaagagagtctgcaatttggcaaccggatattttgttatcaatttcagttacttcgaactgagcatgttctcattcccactttctgtttcggtctgttactaatttctcagaacattagatgctcacaggcgctttattctaatgtctctatttcatgacgagatatgaacatctctgaatctgattgcttcana

SEQ ID NO: 14583 - DNA, 371 bp, Zea mays
  unsure (1)..(371): unsure at all n locations; Clone ID: LIB3159-021-Q1-K1-C8
gaccgaggcgtacggacgaaggagatcttttccgttacctcctccatttttttggagatcgccgccgaggcaagggagcatgtctacctggtgggcggccacaacaaacacctcncctacgacatccccgtaccctcgatcccacccatccccgcgatcccacctatcgccgccactgcctcttctgagcccgacgcggccgagcttgagcgctacggcatcaccgacgacctncgcgagttcgttaaggacatgaccataagcaccttccgcgacttcccactgcaagatgagcctgaaatgactgatgtgccaacggtgtagaatgtgcgtcaggatctgagcaaaaggcaggccatgcacgccacact

SEQ ID NO: 14584 - DNA, 401 bp, Zea mays
  Clone ID: LIB3159-021-Q1-K1-D1
agctcaccggcggcgtcccgtcgttcccggactcgttcccgctgctccggctggacctcaggcgcaatgcgctctccggcggcgtgcccgccctgccggccgggctgcagtacctgtcgctgtccgcgaacaagctcagcggcacggtggaccaggtgctgccccggctggcccggctgaacttcctggacctgagcgtgaaccagctggagggcccgatcccggcgtcggtgttcgcgctgccgctgtccgtgctgcagctgcagaggaacttcttcgcggggccggtgcagccgtcgggcgacgtgacgatcccagtggtggacctgagctacaaccggttctggggccagctgtcgccgctcctcgcgggcgtcgggcagctgtacctgaaacaacaa

SEQ ID NO: 14585 - DNA, 303 bp, Zea mays
  Clone ID: LIB3159-021-Q1-K1-D2
gcgtaacgcaaggagtcataggtgtaccactgccgctttgccatgctcgccgtccccgggatccgggggccggaagctatgggggtggggaactgaaagaaggcgcaagagtgggcggccgaccccggaggacaggccacgtacctgggcgccccggtgccgaggggcacgctgtcgaccatactggtgatcgagttcgtggtcatcaccttcgcacgagcaccaactcaccatggagaaggaccccgagaagaataagtaccccagaggtaccttccacccgatcggtttctccatagaccc

SEQ ID NO: 14586 - DNA, 402 bp, Zea mays
  unsure (1)..(402): unsure at all n locations; Clone ID: LIB3159-021-Q1-K1-D3
cgctctgccaaacgtcatcggcttcagcttcggtgtggtccagatgggtctctacgcgctgtagcgcaacgcgacgcccagggtgcctgccaaggacgtggccgacgacgccagcaaggacaaggcgcccggcgaacatgtggtggtcaccattgccaagctgaccgcggcgacgacggcacctgcagctgccgtggcggaggatcttgtcaaggtccacgacggccacccggaggaagcagccaagggcgccgccaagccggcggagaacggcgcgggacgcagcgacgccgagcaagtctagattcctcgctcgatcagatcagaattcatgaagaagaacatgcgtatgtatgtgtatccggtaggtcgtaacataacatanattaggtgcgcatgcag

SEQ ID NO: 14587 - DNA, 415 bp, Zea mays
  Clone ID: LIB3159-021-Q1-K1-D6
accatacgcacctctctccatctttctgctacttcttcttcttgttgatccagccaatcgagggatcttcatgttggactggggggagcaccatttcgaatcgaatgccgacgccgtagctttcaagacctaccctcagcaggctggcaccgtacgtactaaccgctttatcctcattaagaaccgtccatgtaaggctgagcaagtttctacctcacagactggtaagcatggtcatgcctaatgccactttgtctccatatatatattcaacggtaaaaagctccaagatattgttccttcgacacaaaaatgtgatattccggatgtgaactacactgagtatcagctgattgatatatcacaggatggattcgtgagcctttttactctagatggcaacactaaagatgat

SEQ ID NO: 14588 - DNA, 277 bp, Zea mays
  unsure (1)..(277): unsure at all n locations; Clone ID: LIB3159-021-Q1-K1-D7
caggggggcccccaaaaaacaannccaacaaccccagcaagaacaagccccccgccaaacatgtggnggtcaccattgccaagctgaccgcttctactacggcacctgcagctaccgtggcggaggatcttgtcaaggtccacgacggccacccggaggaagcatccaagggcgcctccaagccggcggagaacgactcggaacgcagcgacgccgagcaagtctagattcctcgctcgatcagatcagaattcatgaagaacaacatgcgtatgta

SEQ ID NO: 14589 - DNA, 445 bp, Zea mays
  unsure (1)..(445): unsure at all n locations; Clone ID: LIB3159-021-Q1-K1-D8
cgggcccgaccgcgacgcgtaacgggcagctacctaactagatactattttatgaccagtttttttccagatggtgctgtacgcgctgtggggcatcgcgacggccagggtgcctctcaacgacgtcgccgacgacgccagcaaggacaaggcgcccggcgaacatgtggaggttaccattgccaagctgaccgatgatactacggaacctgcaactgccgtggcggaggatcttgttaaggtacacgacggccaccctgaggaagcagccaagggcgccgacaagccggcgtagaacagctcgggacgcagcgacgacgagcaagtctagattcctcgctcgatcagatcagaattcatgaacaagaacatgcgtatgtatgtgtatccggtaggtcgtaacataacatanattaagtgcgcatgcatgttggcaactcatgtt

SEQ ID NO: 14590 - DNA, 457 bp, Zea mays
  Clone ID: LIB3159-021-Q1-K1-E10
ccacttcgcaagcttcgtcgcacacttttttcccctgcctccaaaaactcagaagacgcgcttaccgacggggggggccatgcttctccaccaccgcctcctccctcgcctacttcttgttccttccacacatacctccacactcctctgcccctcccgtttgccgcgccgcctctccctctcgccacgcttctacgcgctgccccacctcgcggcaccccagaccgtcgaccactccgacgatgagggggcaccccaaggggaggggcagatcaagctcccgctcgaccatctcttcgtgccgcccggggcaacaatggatgcgggggaccaggaggccgtgagcgcacgggtgcttaagggctccaacatcgtgctgggcccatacgcgcgcggtgacgcacaagtggtcaacccagattttgtaaagagcagcgtgcgtcccgatgactgccct

SEQ ID NO: 14591 - DNA, 336 bp, Zea mays
  Clone ID: LIB3159-021-Q1-K1-E3
cgcgtaacgcaaagaccactgtcaaggcaattttactacgtcgcttttatttgaccacttcctcgcttgctacatggcgtggtaaaaagaacatagcggtcggccacttctatttttgatgtgcaaggcgtgggtttcaagaccttctaaaactctgccagggtattaatcacactattacagaacatctacaacgataactacccacagacattgtcccatatgtatataattaatgcgggccactgcttcaagatcttatgcagcacaatcaaatcattccttgacccaaaaactgcttccaacactcatgttcttgagaatacgtatcaacat

SEQ ID NO: 14592 - DNA, 373 bp, Zea mays
  Clone ID: LIB3159-021-Q1-K1-E5
cccggccgacccacgcgtacgtgccgatctatctagcgagatatagagattatagttcgctcgctagcatggagtgcggcggcaagaatgcagcaggcggcgggttggcgctgctgcttctccagctggtgttagctccgacgacggcgacggcccgcctcctgcaggcggacacctccaccgtggctggcctggacatcatcgccagggagtttggccatccagtgagaggcatcctctgtggtgaaacctgtgtcttcctaccatgctataccgcagccatgggttgccaatacatcgtccaaatctgcatgatgtgatatctggactagccctattcgcaatttgtgatgggagaaacacaaacaccgta

SEQ ID NO: 14593 - DNA, 284 bp, Zea mays
  Clone ID: LIB3159-021-Q1-K1-E6
cttgtacctcgccgacgagagctacaccggccactactcaccgcatctggaccacgccatactgcgccaccactgctccgccggcggaataccgttgcagaccatcaacctcagaggcatcatgatctgcaacgcggcgatcaactactatactgacactaatggcatgtaccacttgttatggacgcacgcgctcatctactacgcgacgggcgacgccatttgcaggcactgcaactatagcgccgccgacggcggcttcgatggctccatcgacaagtgct

SEQ ID NO: 14594 - DNA, 155 bp, Zea mays
  Clone ID: LIB3159-021-Q1-K1-E8
actatggtaagacgttcaagaaaccaaagacctcttatgacaatgaccgtcttgatgctgcactgaagctgatcctttactatcgactctggcccaagcctcagcttttgagggatcaaaatacactgagcaacatccttaatacttcatggcac

SEQ ID NO: 14595 - DNA, 419 bp, Zea mays
  unsure (1)..(419): unsure at all n locations; Clone ID: LIB3159-021-Q1-K1-E9
cctcttcacccgcctagatctnnggatttttaacttatctggtcatctggtgcgtagcttgagaaactggagcgtcttcactatctggaactttataagaataacattcaaggaacaatcccttctgagcttggcaatttgaagaatctaataagcttcgacttgtacaagaacaacatttcggggacaatacctcctgcccttggaaagttgaagtcccttgtattcttgcgtctcaatggcaatcatttgactgggcccatcccaagggaactcgctggaatatctagtctcaaagttgttgatgtttcaagtaatgatttgtgcgggacgattcccacgtctggaccatttgagcatattcctctgagcaactttgagaagaacccgcgcttggaaggtccagagctacaaggcct

SEQ ID NO: 14596 - DNA, 410 bp, Zea mays
  Clone ID: LIB3159-021-Q1-K1-F1
accagaacgcccggggcgacccacgcgtacgctcagcttcgcctaaaacccatagttcgcatactcttcaaccttccatcctctcgcatcgtgtgggggcgcacctgaactacccgatgcatgcttttatgagcaaaaaacctcatgaaaaatccttcaagcgggctcaacagtcatttgctccattaactgcttatttgccatgtgatatacatattgtgaacctgaaggtccctctgcccctaagatttcctcacaccgaatcagcagagccaaaatttgctgttctgttgcagaggataagctgggacgcatcatactgcataaggtgtggactgcagtgtacaacagttggagaagagccagtaaatctgttctacatgttcaaagatttgtcagctgtgaatgtg

SEQ ID NO: 14597 - DNA, 277 bp, Zea mays
  unsure (1)..(277): unsure at all n locations; Clone ID: LIB3159-021-Q1-K1-F10
tcatacccaaattangaagatgaagggtttgaaacacaagaaggctcacctgatggagattcatgtcaatggttgtaccattgctgacaaggtggactacggctacaaattttttgagaaagaggtccctgttgatgctgtcttccagaaggatgaaatgattgacatcattgttgtgaccaaaggtaaaagttatgatggcgtggtcactccttgtggtgtcacccgcctttcccgcaaaacccacaggggtctccgcaaggttgcttgtatcggt

SEQ ID NO: 14598 - DNA, 457 bp, Zea mays
  Clone ID: LIB3159-021-Q1-K1-F11
gtggatcctctaaagtttactcacgcgtttcttttacccgtccgcccacgcgtccgtgggtctttatctgctggatgggcgagcaccactctcgccttccgtccctgcgcatccgccgtgcccatggacggcggctggtcgaacggcggcgccacctggtacggccccgccaagggcgctggatccgacggtggtgcgtgtgggtaccagggtgccgtcgaccaacctccgttctcgtcaatgatcaccgccggcagccaatccatcttccaggacggcaagggctgcggcacctgctaccaggtgaagtgcaccggacacgagtcgtgctccggcagcccggtgacagtggtcatcaccgacctgtgccccgacgctacgtgccaggtggagcccgtccacttcgacctgagcgggacggcgttcggtgccatggcgaagcccggccaggccgaca

SEQ ID NO: 14599 - DNA, 465 bp, Zea mays
  unsure (1)..(465): unsure at all n locations; Clone ID: LIB3159-021-Q1-K1-F12
taagacgctaccatgcctggatgaagggctngtttttcntcgaaagaagcaagagatgggagagtagggataggaagacgggtctccagaacctggaacagttccaggacaaggcaaagaaggaaaggctgcggatttggcagtacggagatgttgaatcggacgaggacgagcaggccccgcctgcaaggaagcctggaggtcgtcggtagagactgggcagtgtaaggctgcagtctggcatgctatgaaagttttggacaaccacaaatgttggactctgccgggagttatagatgaggacttactgaggggtaccgtatttatattcggttagaagaagggaacttagcgaggcgaaatcacttttgatattccgtttttacaggcgaaactttctctgttttagcacttttgatattccgtttttacatcgcaagttataaggttaaagatgcattgttt

SEQ ID NO: 14600 - DNA, 266 bp, Zea mays
  Clone ID: LIB3159-021-Q1-K1-F4
aaaacccggccgacccacgcgtacggggacgatgaggataaaaattttgagattttataacagcatgaggagggattagaggtcgcttataaatacaacggggccgacccaaataatgatgataatgatcaaaatactttatatcttacgccaccaatccctcaccctttaaccatgggtactaaaacttaatcacatttatttgaccatgataattctgaccattacaatgatgacgatcataactatcattatatttatacaaa

SEQ ID NO: 14601 - DNA, 323 bp, Zea mays
  unsure (1)..(323): unsure at all n locations; Clone ID: LIB3159-021-Q1-K1-F5
cgacccacgcgtacggagggcctgatcattctacggtgctgggtttcattccactcggaactggctcacatggtggtcgtacattaagctggacacgcgatccccatcacncnattgatccaattgtgagaggagtaaaatcaaaactaaacataagcgtgatggacggtccaaacatataaccacacttctttgttaatgaccctgatatccatttgagtgctaacgcaggttatatcgcttctatgtataacagttttggtaacttatgctatgcatacggagctttaagagccttttggcgacataataatcaacatgtg

SEQ ID NO: 14602 - DNA, 376 bp, Zea mays
  Clone ID: LIB3159-021-Q1-K1-F7
ggccgaccgacgcgtacgagctgatcgtcaagctgcacatcgtcctcggcatcaagtagggccgccgcgcgcctgtcggtctccctcctacccgtgggcagtcgtttcgtttcctaaactggccgggtacgttacgtgcaggtggtccctgatcgccggaaggctgcccggcaggacggacaacgagatcaagaactactggaacacgcacatccggaggaagctgctgagcagggggatcgacccggagacgcaccgtccggtcacggagcaccacgcgtccaacatcaccatatcgttcgagacggaggtggccgccgctgcccgtgatgataagaagggcgccgtcttccggatggaggaggaagaagagccc

SEQ ID NO: 14603 - DNA, 389 bp, Zea mays
  Clone ID: LIB3159-021-Q1-K1-G1
cacttcgccacgaacaaaagcgcatcgatctcgctgtcgtcactcctcgtcacccagccacgaagagaggcaccacccagcatggccctgcaggcggcgctcctcccatccaccctctcatccgtccccaagaagtgcagcatcgccgtcgcggcgaaggacacggcattccttagcgtatcccagaagaaggtgcaggcggcgtcgctgtcggtgagaacgcgggtggcgacgacggcgcctgtggccacgccggggtccagcacggcggccaaggatgggaagaagaccgtgcggcagggcgtggtggtgatcacgggcgcgtcgtcggggttgggcctggcggcggccaaggcgctggcggagaccggcaagtggcacgtggtgat

SEQ ID NO: 14604 - DNA, 356 bp, Zea mays
  Clone ID: LIB3159-021-Q1-K1-G11
tctgcaactgttatctgcctgatcttatctgctttatttgaaacacgcacaaaattcttttacgcacacaacatcatgaggtccattgcaactacccttgcatacataacatttccttcacttacaactcattcaacacacactaatgattctgatactgtctacaattgagacattattgctaaaaacgcaagtccagttgtccaatctctttttggagcattgtctataccatatgacaataccaaagctcgcaagctcattagtaacgcatcaccagaaaacatgcctactcataattagcaaatattcaatgagatactacattatatacatcggtctcttcccgacatctc

SEQ ID NO: 14605 - DNA, 246 bp, Zea mays
  Clone ID: LIB3159-021-Q1-K1-G4
acccggccgacccacgcgtacgatgagtctgaacacactttttttgaacgtttcttttcccccacaaaaacatttctgggcgttctacataaaaaggaggaggcttattatacattataccttaatacctaccttcatatcgatcttattaaaataaacctcctccagttcctcaaaaccacatctgaaaatcctctagttcactaaaatattgacccagccatcaacctccataaacataaatat

SEQ ID NO: 14606 - DNA, 215 bp, Zea mays
  Clone ID: LIB3159-021-Q1-K1-G5
ccgggccgacccacgcgtacgcttggtcctactactgattcttttacaccatgttttcccctacgaaatcacatcgaagaggagacatttaaaagagaggaagggctcttcaatatgcactttacatactactctcttatacaccccagaaaataaaagaaccacttcacaatctcataggcgtcaaagctctgctagatcttactcaaacaaca

SEQ ID NO: 14607 - DNA, 468 bp, Zea mays
  Clone ID: LIB3159-021-Q1-K1-G6
atttttctgagtatccatattaatgcagaaggccatagttcatttccttgtcgttatttgtcactgagaaagaacaaaacattgacttcttgggggagtagacttattaccaacgttggtgtcctgttatctagtttaacctgaacctgttcttgaaaactgtgtcagaaagtcggtttgttctataatatattgtctgtgctatgagctacaataagcaagagtattttaaattagaaagcagttttctaaatgatgcaaaggcagattggtttgagattgcacatggaattcttttagtgaacatcttatcttagtcaagcagtagttaagattaactgttttacttattaccctcaagaactctttgaaactcgactaactattctgtggtttctttcaggtagatgactgttttggccacccgcagtgggttgtccataccatgtcctgaaggaagcaaagtgc

SEQ ID NO: 14608 - DNA, 350 bp, Zea mays
  unsure (1)..(350): unsure at all n locations; Clone ID: LIB3159-021-Q1-K1-G7
ccgggccgacccacgcgtacgncgggcattcattacaatggttgtgtggcttttttagggcgcatgtatgtgcaaagggcagcatattatcaatcccggtacggctacccacaagcctttgtatattcttcttatgggccatcagcatatggacctcaatacctatatcagcacaatgcatatggtacatatgttggacaacagtatatttcaatttacgctggcccaaggacagtaggcccagcaatctacccatatcggcagactggccaacctgtaccaagtgatcatgcttattctcttggatatgccccaagtaccgttctcccactatcgaatcaaaatgttaa

SEQ ID NO: 14609 - DNA, 276 bp, Zea mays
  Clone ID: LIB3159-021-Q1-K1-G8
gcaggccatacctctcagacttggaacatgcgcttgaaccaacgaccgcacgccgatgcgggggccatgatgagccaccagtgagctctccggggacactgcagcctctaccttctcaagatcggcaggagagagaaaaaaccattcgacagcacacaacagcagaaggaaggaatctgcgcgcgccgataggcggaaaaacgatgagcagaaactgactctcgtatgcttcggtaatgtgacgagccggcggcgcattgcaactagcttggacta

SEQ ID NO: 14610 - DNA, 443 bp, Zea mays
  Clone ID: LIB3159-021-Q1-K1-H1
ggcgtcctgtgggaggtcgagggaaagtgggtcacccaaggtcctgttgatgtagacattggtgccaatccatccgccgagggtggtgaggatgaaagcgttgatgacacagccgtgaaggtggttgatattgttgacacattccgtctacaggagcaacctccttttgacaagaaatcatttgtctcttacataaaaaaatacatcaagaatctcactgctgtgttggagccagagaaagcggatgagttcaaaaagggtgtcgagggtgcaaccaagtttctccttagcaagctgaaggaccttcaattttttgttggtgagagcatgaaggacgaagcgtccgtggtattcgcctattacaaggatggtgccactaatccgacattcctctatttctctcatggtcttaaggagatcaagtgctagattagttacccatg

SEQ ID NO: 14611 - DNA, 370 bp, Zea mays
  Clone ID: LIB3159-021-Q1-K1-H12
cacacacacacacacacagacaagtggtttccatagccaagtgtgtgtactagcaaccagcgtagctcgggcggcagcaggcagccatcatgtcggaggagaagcaccaccacttcttcaaccaccacaagaaggacgaggagcagcccgccggcgagtacgggtactccgagaccgaggtggtcaccgccaccggcgagggcgagtacgagaggacaagaggaggagaagagcacagccaagcgacctggcgaggcggcgccatcgccgcggcgccttcgactctacgagagcacgaggcgaagaagacccgagcacgcgcacaggcacaagatcacggaggagggtcgcttgccgcgggcgggccgtc

SEQ ID NO: 14612 - DNA, 292 bp, Zea mays
  Clone ID: LIB3159-021-Q1-K1-H3
gacaaatggctcaaaagactagctaccgatgtctttggacaaccgttgtgttttgtttgaggtgagcgtctgctatgccagggtggtccgtatcaagatggagctgtccaccaaccatgtgcctaagaccgacataaactatcgcgcgatgtgcactgctgataatgtagcatgcaagtctggtaagccggtgaactacaatggctccaccttccaatgtaacatggtcgagatatgcgccaaggcggctgactgactcacggaaacgtgaccagtggctagtccatctacg

SEQ ID NO: 14613 - DNA, 324 bp, Zea mays
  Clone ID: LIB3159-021-Q1-K1-H4
gtgacgaaggtggttttgctccgaacattcattagaacaaggaaggacttgagcgctggaaaactgcaattgagaaggctggatacactggcaaggttgtcatcggaatggatgttgctgcttccgagttttacagtgacaaggaccaaacctatgacctcaactttaaagaggagaataatgatggttcacagaagatatctggcgatagcttaaagaatgtatacaaatcttttgtgagcgaataccccattgtttcgattgaagatccttttgaccaggatgactgcgtttactatgctaacatgactgaagaaattggag

SEQ ID NO: 14614 - DNA, 460 bp, Zea mays
  Clone ID: LIB3159-021-Q1-K1-H6
cacaaagggaggaagagaagagactcagccgggtatcagaggaagctgcacagtttattgcttagggagaaggagttgattgtcgggtccaaacctagtcctagaaagacaagcagcttcaataggaggaccagcaaccaccatccaaacgcaaatggcgctggattcatgactccggtgccacgccgagtttcagctggcagtgccaccccagagcttctgaccccacgctcgtattctggccggtacaacaactacttgaaggagaacaggcgcctgacagctgcactcactgaacttctgagttggttccaaggaggatagcatgtcatccttcgcatacatcagtggctcggaacctgattcgccattgttgttgcactaagtgttggctagggaggagacttcttggtgagaagggtgatagcctcaagatcggaccattgtgtgtgtgtgtgtg

SEQ ID NO: 14615 - DNA, 426 bp, Zea mays
  unsure (1)..(426): unsure at all n locations; Clone ID: LIB3159-021-Q1-K1-H8
tcctcagcggggacgtggccggcggcgtcgacctcaagcccaacgagttccagttcctggcgtgcgggtccggccggaggatgtgccccggggtccactcggcgtccgcgaccatcgaggcgatgctgtccaacctcatgtaccggttcgactggcagctgccggcggggatgaaggcggaggacgtggacatgaccgaggtgtttgggatcacggtctcgaggaaggagaagctgctcctagtcccacaggctgcgtgaggatgatgatgatactagtgcaatgcgatacaggggtttaaaattagtaacaccaaaggctgtgttactggaccttaattaataattaataaatgtgctactactatatagccaggcttcacagtgacacatacttntattgcccatgctacatatatgtgttctt

SEQ ID NO: 14616 - DNA, 455 bp, Zea mays
  Clone ID: LIB3159-021-Q1-K1-H9
cccacgcgtccgggcttctcctccccctccggttcggtttcgggttcgtgaggttctccggggtgcgggttcgtgggtgagcggatcgagatggcggcgtcggatgttgagtaccgctgcttcgtcggcggcctcgcctgggccacggacgaccactccctccacaacgccttcagcacctacggcgaggtcctcgagtccaagatcatcctcgatcgggagacgcagaggtcccgcggcttcggcttcgtcaccttctccacggaggaggcgatgcggaacgccatcgagggcatgaacggcaaggagctggacggccgcaacatcaccgtcaacgaggcccagtcccgcggcggccgtggaggcggcggcggtgggtacggtggtggccgtggaagcggcggctaccgcggtggcgggcgccgtgatggcggtggcggctaccgcggtggcgg

SEQ ID NO: 14617 - DNA, 329 bp, Zea mays
  unsure (1)..(329): unsure at all n locations; Clone ID: LIB3159-015-F8-R1A
gtgcgcttcgctggtgcggttgtcgtgtccgtggtggggctccgcctgctgcggcttcttccgtcggggctctttcgtctgtggtcgtctcccggggctgtgtgctgggcggtggtgtgcgctgtcctgtctgctgggctgccgtgcctgtcgccgctgtggctgggctgctgccgtgcttgcgtctctgtcnttcgtcttgcgtcttgccgtggcttggttctcggggctcgtgcccggtttgtcgttgcgggcttcctgcgggtgtctcggcgtgtgcggggtccgtgcgtgccgcggtcggtgggggtgggtgtccctcggggtgt

SEQ ID NO: 14618 - DNA, 269 bp, Zea mays
  Clone ID: LIB3159-018-F2-R1A
gttcacagatgaagagattggacaaagctatggagaattttatgaagatgtacatacagaatttctgaaatttggtgaacttgtaagtttcaaggtatgtagagatgggtctttccatcttcgagggaatgtttatgtgcactataagtcgttggattcagctcgtcttgcctacagcagcatgaatagacgctattttactggaaaacagatagaaggcggccatatgcggtgagtacatgaagtcaagatacaagacaggttcacat

SEQ ID NO: 14619 - DNA, 525 bp, Zea mays
  Clone ID: LIB3159-013-D3-F1A
cgtacgaagctcggattcggctcgagccgaccgctcaagccgctcgagccgctcgagttccgttaacgctctccaatacaaagtaaccactcactgggtattcggtcgaagatgtccgccgccgaagaagctaaagttcccgccgtcgaaaagccggtggaggaggtgaaggcgccgaagcttgccaaggagaagaaacctaaggctccgaaggaaaagaagccgaaacaggccaaaactgcttctcatcctccatatctccagatgattaaggacgctttgattgctctgaacgagaaaggaggatcgagtccatatgcgatacgaagtacatggaggagaagcacaaggcggtgcttcctgcgaatttcaagaagatactaggtctgcaactgaagaaccaagctgcgagaggggaactcgtcaagatcaaggcttcgtacaagttagccgaagccgcgaagaaggtgaaggagagcaccgccaaagcgacgaaggaatcgcgtccgaaacgaaacaaaatcg

SEQ ID NO: 14620 - DNA, 364 bp, Zea mays
  Clone ID: LIB3159-003-Q1-K1-A8
ggaaaatattcatggaccatgatcccgcgctgtttgaggagtgtcacaagaagtttgaggaagaggaagcccaagaagctggcgtaaggtcaagacgggaggctagatggaggcgcctagaagaaatcgcctcgtcaaagtctcctcagtgaagtagcgcgtcctcctgaggctgtagttcttcatcagtagagttcttctagctatcttgtcttggggacttgcatattagcagctcttttggacaggatcaagtaaatgctgatgatgtagttgctggatgtcttcttgccgcctgttacttgtgaccgaacgttctacaggccgacatgtaaatacgaggcacatgatgggctgtgaagct

SEQ ID NO: 14621 - DNA, 398 bp, Zea mays
  unsure (1)..(398): unsure at all n locations; Clone ID: LIB3159-003-Q1-K1-B4
cttccgttttcaagggaaggtcgataaactgtgagatactgagattgaagctgcacactgttttagtttcttcaaggacaaggaacattaatatcaccaaatactttcgtcaatggagcttgaagctgatttcgctgatgaagatgtcagttcaaataatggattacaagatctgtggtcacttgacgagatagattcaaagagagcaagattcccgtgctgcattgtttggactcctcttcctgtagtttcatggcttgccccttacatagggcatgttggaatctgtcaggaggatggggctatcttggattttgctggttcaaatttggtgagcatggataattttgcttatggttcagttgccagatacctncagcttgacagatagaagtgct

SEQ ID NO: 14622 - DNA, 339 bp, Zea mays
  Clone ID: LIB3159-003-Q1-K1-B5
aaagcaaagagagagagagagagagagaggcaggctaggttaggaagacgcagccaatggcggggcttcacttcgtgctcgtgccgctactggcgcagggccacataatcccgatggtggacctggcgcgccttctcgccggccgcggcgcgcgcgtcagcgtggtcaccacgcccgtcaacgcctcgcgcaacggggccgtcttctatagcgcgcggctagcggggctcgaccttcaactggcggagggcgcgttccccggcccggggctcgggctgccaaaaaggatggaaaaacgtcgacttggtgggggaaaaagaacactttatgccatttttt

SEQ ID NO: 14623 - DNA, 261 bp, Zea mays
  Clone ID: LIB3159-003-Q1-K1-C1
tcgcagtgaaagttatatgggagacgggtggcgcatggacttcagtaaaactcatttgggggccttttcgcctccagatttctatactatggtaaggatcgcaggtgtgaaggcagacagtgtgatgaagaagacaagggtgattgttgaccagtggttgccgatgtgggatgaggagtttacgtttccttctgacggttcctgatactgtccctcctaatggttgaggtccatgattactactatgttgtataatcacta

SEQ ID NO: 14624 - DNA, 363 bp, Zea mays
  Clone ID: LIB3159-003-Q1-K1-C4
cgtggacgcgtgggcggcgctagacgaatcggacggaaggaagacgagaaggccctgaggcgagcgggggatcaaagaagaagatgaaggtccgtgcggcggtgaagcgcctgtgccggttctgcaaggtggtgatacgccggggaatcgtcttcgtccaatgcacggccaacgccaagcacaagcagcgccagggcttctccaccatcgccgaagcagccgtcgtctcgtgcgttcacctgcctccgtcgccgcccgctagcggttccgcctccgccgcatcgttcgcagaagcttttaaggtggcgagacaagaaatgtctattaaagttaaatgggcggttgggtttaactgccctgttc

SEQ ID NO: 14625 - DNA, 338 bp, Zea mays
  Clone ID: LIB3159-003-Q1-K1-C7
ttgtatggaaccagtggaacagcaacatgaaattctctctgaatggttgtgttatcagtggcacccttgatggagctaatgttgaaataagagaggaggttggagaagataatttcttccttttccggtgccaaagccgatgaaattgctgggctgaggaaggatagagaaaatggtctgttcaaaccagacccacgttttgaagaagccaagcattttataaggagtggcgcttttggcagctatgactatgaacctctcttggattcccttgaaaggaatttctggatttgggcgtggtgattatttccttgttggctatgactttccaagctaca

SEQ ID NO: 14626 - DNA, 159 bp, Zea mays
  Clone ID: LIB3159-003-Q1-K1-D3
tgaggtcgaggctcatgaggagatccatatgctcgtccagcatatcccgagggcggggtcatgtcaagtttggcgtcctcttcaatacaaccggtgtcaaatatcttgaagctattttagctccttgagggccgtcaagaagaggaagattctaaccta

SEQ ID NO: 14627 - DNA, 301 bp, Zea mays
  Clone ID: LIB3159-003-Q1-K1-D8
tcggtcgttctcaatccagagagccgtaccattcctcatcgccccagaccagaccaacagtgagtacagcagcagcagctgagagcgtcatgcgtgagagcgtgcgaagcatgagggaggacaagaagaagccgatggcggttgtgagcggcagcggcgggaggctgaacccctgggcaaagcccttcgtgcctttcggggcgtggtaccgcggcctgcggaccgtggaggcgactccggattaagaggtggatgacttctcccccgagtggttggcgcctggtgtctggctccccggcct

SEQ ID NO: 14628 - DNA, 304 bp, Zea mays
  Clone ID: LIB3159-003-Q1-K1-E3
aggaggtcggcccggatggccaggaggtgactaaggtggtgcctgctgtcacccccgaggttaaggatactctggttgagaacataaggatgaggatgacaccacatcctctcaagatccgtgctgatatatagatgaaatgctcccagtttgatggagtgctccatattaagcaagctttgaagaaagctgaagctgctttcaatgataactgtcctgtgaatattaatttatttgctcctccattttattgtttgaccacacagacccttttcaaggatcaaggcattttatttcacactac

SEQ ID NO: 14629 - DNA, 409 bp, Zea mays
  Clone ID: LIB3159-003-Q1-K1-F11
cttccggtgctgaaccctttcgccacaggaatggcaccctacaagggaaagctgtttgtccctcagagcctgtactcatggccattcttttttgacattggaggtgagatctacgacccagatctgaatgcctggtcaacgatgccggatggtctcggcgatggatggccagccagacaggcaggcacaaagttgggtgttgtgatcgatgacagactttacacgctagagccttccagctctttggacagtggtaagataaaaagatacgactccgaggaggacgcatgggtaactatcaccccacaagttccagttaatgatttcactggtgcagaggccccttatttactcgctggcctcggtggaaggctccatgttataacaaaggcggcgaacaacactcttc

SEQ ID NO: 14630 - DNA, 234 bp, Zea mays
  Clone ID: LIB3159-003-Q1-K1-G6
caacataatcttgttgaacagtctgttttttttggcgattaggacaaaatgtataaagatctatttatgaaagcaatgtcaatccaagcttaccttttttttttttttcacagaaaaacccacgcgttcgcccacgcgtccgcccacactttctaaaaatatataaaaaaaatattaatattagtttaggtaattaactactttattatatatataaatatagattattaggcg

SEQ ID NO: 14631 - DNA, 422 bp, Zea mays
  Clone ID: LIB3159-004-Q1-K1-A3
ttccaggtgaggaaagttacctttgtgatgaacctttatcaccaagcagggctcttcgtgcagcaatgctcaggagtcgttttgctgggactatagtgaaggctcaacagaaggcacttctggatcatgggaagaatatagaccctgtgaaattgcaattggaaaaggagaggctggaaaagaggcagcaagaagagaaagcaaggattgaggctcaggtgaaggctgctgaagcagctgcacaacaaaagtttgaggaagaaatgagggtgaagcgagagcaggaaagggaagcagcacggctggcagtacgcatggtacaacctgcttgcggttttctgacctgcaagtttatatgcttgatggtatgaagggataaatctcctcttgtgcagatgaagaagactgttgatattgacaac

SEQ ID NO: 14632 - DNA, 411 bp, Zea mays
  Clone ID: LIB3159-004-Q1-K1-B2
cggacccgtgggcaagcgggctgaggagctgcagcgccgtgggcgtgcccagcctgctggcgccgtcgtcccggtccggccgcctggcgccgttctgcgccaacgccaccacctctggccgcgtcaccatgtccgcggagtggatgcccggccagccacgccctgcccacctcgacggctcctctcccggggacttcggcttcgatccgctgggcctcgcgaccgtgccggagaacttcgagcggttcaaggagtcagaggtgtaccactgccgctgggccatgcttgccgtccccgggatcctggtgccggaagctctgggcctgggcaactgggtgaaggcgcatgagtgggccgccgtccctcgcgggcaggccacgtacctggggcgccccgtgccgtggtgcacgc

SEQ ID NO: 14633 - DNA, 412 bp, Zea mays
  Clone ID: LIB3159-004-Q1-K1-B3
gctgaagctcctctctccctgccttcttctcctcgccttctttgccaccgcggcgtacgcggcgtctgcgtcggcgtcgcgcgcggcggccgtcgtcaggggcgcgggcgccccgtcgcagtcggagttggagtcggacccggagaaccagtgcgtgtacacggcgtacgtgcggacggggtccatctggaagggcggcacggactcgaccatcggcgtgacgctgctgggccccgacggcacgggcattcggatccgggacctggcggggtggggcggcctcatgggcgccggccacgactactacgagcgcggcaaccttgacatcttcagcggccggggcccctgcatgagccaggcgctctgcgccatgaacctcactttctacggcaccggtgcgcaccaagggtgg

SEQ ID NO: 14634 - DNA, 410 bp, Zea mays
  Clone ID: LIB3159-004-Q1-K1-C1
gtgatcgggaaccatgaccaagagggtacgctatcgcgtgagggtgtgatgcgtcaccgtgtgggcatgaaaaacacccttgcaagcttcaatccggaaggaattgaaattgatggttacggaaattacaatttggaagtttccggggttgaagggacatccatggatgaaaaatcagtgctcaacctgtatttcctggacagcggtgactattccactgtgccgtcaatcaatggttatggttggatcaaggcttcacagcaagtctggttccaacaaacatcttcaagtctacaggcaaagtatatgaataagaacccgaaacagaaggaaccagcacctggccttgtgttcttccacattccactaccagagttcagcagttttacggcatccaatttcacaggagt

SEQ ID NO: 14635 - DNA, 294 bp, Zea mays
  Clone ID: LIB3159-004-Q1-K1-C4
ctttcattcgccgccgccgcctcctctctgttgccgtcgccatggggagaaggcctgcggagatgctatcgccaaatcaggagcaagccataccccaagtccaggtactgcctctgctgttcctgaccccaagattaggatctactatgtcggcataaagagaaaaggagttgatgaattcccctactgtgtgcaccttgtctcttgggaaaaagaaaatgtctccagtgaggctcttgaagctggcccaattgcctgcaacaagtacatgaccaaatctgcaagaaaagaatg

SEQ ID NO: 14636 - DNA, 384 bp, Zea mays
  unsure (1)..(384): unsure at all n locations; Clone ID: LIB3159-004-Q1-K1-D1
gccgtgtgggacaccggtgcgtgctcgagctccaccagtcgccgccgccatgtcgctgattgcgggggaggactttcagcacatcctgcgtttgcttaacaccaacgtggatggcaagcagaagatcatgtttgccctcacctccatcaagggtgtcggccaccatttctccaacatcgtctgcaaaaaggccaacatcgacatgaacaagcaggctggtgagctatcctagatgagcttgagcgccttcatgactgtggttgccaaccctcgccagtttaaggtccttgactggttcctcaacaataagaaggactacaaagatggtaggttctctcaggttgtttccaatgccctcgacatgaagctcanggatgaccttga

SEQ ID NO: 14637 - DNA, 409 bp, Zea mays
  Clone ID: LIB3159-004-Q1-K1-D3
cgccgcaaacccctccccttcgcttccttccctagcgccgacgcccaccagacgagatgggcccgaagaaggacaaggccccgccgccgtcgtcgaagccggccaagtccggtggtggcaagcaaaagaagaagaagtggagcaagggaaagctaaaggagaaggtaaacaacgcggtgctgttcgaccaggctacctacgacaagctgctctcggaggtgcccaagtacaagcaaatcaccccttccatcctctccgagcgtctgaggatcaacggctcccttgctcggagggccatcaaggacttgatggcgcgtggcctcattcggatggtctcggtccactcaagccagcagatctacaccagggcaaccaatacataaggatggggaagaggtctaaaatgcat

SEQ ID NO: 14638 - DNA, 435 bp, Zea mays
  Clone ID: LIB3159-004-Q1-K1-F1
gttcaaggccgggtcccagatcttcagcgagggcgggcttgactacctcggcaacccgagcctgatccacgcgcagagcatcctggccatctgggcgtgccaggtggtgctcatgggcgccgtcgaggggtaccgcatcgccggtggcccgctcggggaggtggtcgacccgctgtaccccggcggcagcttcgacccgctcgggctcgccgacgacccggaggcgttcgcggagctcaaggtcaaggagatcaagaacggccgcctcgccatgttctccatgttcggcttcttcgtgcaggccatcgtcaccggcaagggtcccgttgagaacctcgccgaccacctcgctgaccctgtcaacaacaacgcctgggcctacgctaccaacttcgtccccgggaagtgagcgagggcatatacatacttgtatgc

SEQ ID NO: 14639 - DNA, 424 bp, Zea mays
  Clone ID: LIB3159-004-Q1-K1-F2
ctcaacaccttacgtccctagccatcctccgccgcctccgtctctgcttccctagaggcggcgcgatggcagcagcccctgccggtgcccctgcaatcaccgcatcctcctcctttgtttcttcgtctccgttctgtctcaaggcatcgatgaccagccagcgccgacccgcggggagagtctccatcgtcatccgctgcgtcagtagcccgccggccgtcgacacatctttcaagactaatgtcccgcgcaatgctaatatggccaaactccaagcaggatatttgtttcctgagattgccaggagaagagccgctcatttgctgaagtttccagatgccaaaattataagccttggaataggcgacactaccgagcccattccaaatgtcataacaaatgccatggcagagagagcacatgc

SEQ ID NO: 14640 - DNA, 354 bp, Zea mays
  Clone ID: LIB3159-004-Q1-K1-F5
gagcagcttactagcatattgcctgatcttgagaagaagcttgaggacctgtctgaagcgggcccaatcgctgacatggatgagatggtgaaggcaatcgtgtccagggtaactgatgtgatgccaaaagctgcatcttttacttcttcccagatggcaacctcaagcaatggattcgactcctcggttatgtctacggcagcgacaaccggaagctctggaagcaccgtgactgaccttgcggttgtaggcagaggcgtcaaacgagctaacatcaagccgatctctgctgaacctgctgttaagaaacctgcacttgattcaccatctcaacaaggtgacagcagcatcaac

SEQ ID NO: 14641 - DNA, 360 bp, Zea mays
  Clone ID: LIB3159-004-Q1-K1-G11
ctgatccattaaatggggaggctgttttactgatgatgcgtgatcggcctgtttcgtagcataaagtgaaagaatgttgtgaaaagtatgctaaaccagaggacgctggcatcaccccggaagacaagtccagtgacgaagagcttagcgatgacgacgacgacgacaacgactccggggacgaagctatacttggcaatcctgatccttagtctgagtaggaaacagcgcagtcagctcatcaatacattgtccaattgcagaaactgcaagtaaacaaaaactgaaaaactaaaaaaaaaacctctggatgtcatgtaaataagtgtactttgtatgttctccaatgtttgtttcctt

SEQ ID NO: 14642 - DNA, 240 bp, Zea mays
  Clone ID: LIB3159-004-Q1-K1-G2
ggaggacatggttgctggagtgacttggccgtccatcttgccaccgggttggacaggcgggtgggaccctacctcggctgaggaggagcatgaggagtgatgggacaggcttccccatctctctgtttatttatcgttagttttattccgatgcattccgaacaatgatgactacttttgccaaaactccgatgatgatgtaataaatttaatactctttaatgtgtggatttatgcttt

SEQ ID NO: 14643 - DNA, 360 bp, Zea mays
  unsure (1)..(360): unsure at all n locations; Clone ID: LIB3159-004-Q1-K1-G4
gccacctgctcggcgagccatggccggtcgtcgcgaaggcgagcaccangcgagccctgtgcgatccgggacgcccgcggcggacgaagactcagacgccttcccctccgccatcatcttcttcgctctcgttggcgctaccgccaccaccgccgccgtcggacaactgcgccggacggtcagctggttctacactcaacttagtacgtcggaaccatatgttttctgggaagacatacctcgtcgaccaaatcgtcatcggtgcggtgaagcctgggaacgatatcaccagaagatgcgtgacaggaccgatgatcaaagggaaagagtggaacgcatacggcacatgcaagatgtatt

SEQ ID NO: 14644 - DNA, 348 bp, Zea mays
  Clone ID: LIB3159-004-Q1-K1-H10
gcagaacaagaatatgaaaaggaaatgctcaatgagaggatagcaaagctttccgcgctgcgcctactcgatgcgggccaagtggaaaaagaaaatgatgctgaagctcaagatgaagcacctgaagatgacgtaaatatctaatagctgcttttatgaccgattattgttagcttatgctgcaccatggctgtgacgcgttgggatgattgtctccctttgtagacatgctttgctgtaaacgtaagcgatgtaaaccgtactttttgattaattctaaactttctgagactgcgtttatatttgaatttgacgataattatatgatgctctaactttattgatatt

SEQ ID NO: 14645 - DNA, 219 bp, Zea mays
  Clone ID: LIB3159-005-Q1-K1-B4
tcgtttctccgtccagacgccctcttacctgatcggtgagttcctcggcgactactgctgggacggcgccgggctgtccgcggacccggatgcattctcgcggaacagggctctgaggtgatccacgggcggtgggcgatgctgggtgcgctgggctgcattaccccggaggtgctggataagtgggtgctcgtggtcttcaaggagcccgtgtggttc

SEQ ID NO: 14646 - DNA, 281 bp, Zea mays
  Clone ID: LIB3159-005-Q1-K1-C4
gacaccctctgagctaaagctgttgaattcatcatgtaccatgctgagatatccattggcggggttcaggagagcatgagcaaatcaatactagcagttctccctaagtgacagcgcaccttatagccattgttagtttcggagattttgcaagcgagatgaaagcggaagctgagagattgggcgtctcctgcttttcttgggaagagttttcttcaatgggaaaacaagactaccaacttcccaataaacgtaaggaagatatctgttcaatcatgtat

SEQ ID NO: 14647 - DNA, 278 bp, Zea mays
  Clone ID: LIB3159-005-Q1-K1-F4
tcgcacgcatactgcatacacaacacagagcatctgaaggagctacgatctgatcgacatggctgccgtcaccatggctatcacctcccgcgcgctcgtcggcaagccggcgctggcacgagggacgtcttcggcgagggccgcatcaccatgcgcaagaccgccgccaagcccaagccggcggctggcacgagggacgtcttcggcgagggccgcatcaccatgcgcaagaccgccgccaagcccaagccggctgccggaggccgtctagatcgcga

SEQ ID NO: 14648 - DNA, 417 bp, Zea mays
  Clone ID: LIB3159-005-Q1-K1-G5
tcgcggacgcgtgggtgcggaaaaggaagataatgatgactattaagaagttttgggagagcttgggcaagtttatcaagcttggttgcatctaggacacatggaatcacaacgccttgctccattgttgcgcttccactcttctaaaaacgagggagatttgataagtcttgatcaatatgtatagagcatgcctgaaagtcaaaaggcaatctactacatcgctacagatagtcttcagagtgcaaagactgctcctttcctggaaaagctggtccagaaagatattgaagttctctaccttattgagccgatagatgagggtgccattcagaacttgcagacctacaaagagaagaaatttgtggatattatcaaagaggatctggaattgggggagaaaatgcttatgctttt

SEQ ID NO: 14649 - DNA, 291 bp, Zea mays
  Clone ID: LIB3159-005-Q1-K1-H3
tcgagggaagcggccttcctatgtgtagccaacaaggccttctggcccacgtttggcattcatgggggccttctaaagctacgcccagggtgaccttcttctctacaacttctcctatataagcgagctgcatgagctgccccggccttcaacaaatgctggttaggttggatattctgtgccctctggtttaaaggcggccgatgtctactgctgtatccaccacccgtgtcacacccccatcacatacggcgtttccactcccatgaccacctgtttccatgactctta

SEQ ID NO: 14650 - DNA, 205 bp, Zea mays
  Clone ID: LIB3159-006-Q1-K1-A1
tccgggtggccttcctttcggcatgcgggagcacaaaattctaaagagaccacgccttgacgatgtcctcaataccgcccatcttttcctctgactgccccttttccttctaacgacaccaggagagaaatttcctcctgtgcgcgtgaaacaattttccttctcgccacgagatcatctccaactcaatggaagacctaaaagt

SEQ ID NO: 14651 - DNA, 388 bp, Zea mays
  Clone ID: LIB3159-006-Q1-K1-A4
acatcaacccgccggtggcgccgccgctgggcggatacgggtacgggagcccgttcttcggcggctacggctacggctggtcgccgttcagcttcttcgcccccgggccgagcgtcgccgtcggggtcggcggcggcttcgacacgctcgtcctcttcttggtgctgggcgccgtcgtcggagctgtcaggcggttcctcaacaggaacaacgacgattacgacgactactgattatcagtgccaggctcctgctacgtacttcaccttcgtgtgtaatatatatatgacgaaatttttcccgtgcggaattctaggaacggagtgtactgacgatgcatcaggagatgtatgtaataattttgtccacagtgaaatgtaatgagcat

SEQ ID NO: 14652 - DNA, 242 bp, Zea mays
  unsure (1)..(242): unsure at all n locations; Clone ID: LIB3159-006-Q1-K1-B10
cgcatcccctccgcctcgnncctggcncggcncgccccaacnncgctgccggccgccgccggcgcaanccccgcggggacgcgcgccacgncgcaccccggagaagacaggcggaaacgcanggacgccaccgccancgcacggaaacggaaccgagncnagcggcacggcgaaacgcgccggcgagccagaggcgaggaccaacagcgacggcggcggcggcggcagcaaggacgcgggca

SEQ ID NO: 14653 - DNA, 417 bp, Zea mays
  Clone ID: LIB3159-006-Q1-K1-B9
ggtcctcgctcacccgaaccagcaaccctaatccgtggccgcggacccgccgcaagctccggcgcgcgaatagattggggatgcagtcgaggctacgcgggaactggtcgcgctcgagatcttagcctccgcacctgaaaccattggctccattgctattgctgtcgtggttcaggtgatgaaatcttggggagcccgcctcgctcggtcctaagatgctggcgagctacggaggtggtggccgcggcgtccatctctcctccaacaaggacatcctccttgggcgcggcgggccggagcttccttctggggaaacacgtgggttcttctcttcacctacccggcgcggcctcctgacaccacggaccgtcgcgcgcccgccggtttcttggccgcgatcaaccgggccccctgcat

SEQ ID NO: 14654 - DNA, 142 bp, Zea mays
  unsure (1)..(142): unsure at all n locations; Clone ID: LIB3159-006-Q1-K1-G8
gcacgcccaaaaanaccaagggccnncaccccngggagcgcaccaacaccacccggagaggggagcgacacgccgccggcgcggaaaaggagggcggaggcacgacggcggaagagaacgccggaaagaaagaggaggagga

SEQ ID NO: 14655 - DNA, 254 bp, Zea mays
  unsure (1)..(254): unsure at all n locations; Clone ID: LIB3159-006-Q1-K1-H9
accagctncagncgccgccaggcttccgacgcaacttctaactccgttcgccttcaggcgagaccattgcccgctggcacgccgccacannnnggtaacacaatctggcccggagcttagttgaatcctgcttccgccactgcggacaaccatggcgtctgcgaagctgcagctgcctgctgactacacgcgtctcctgctcatcacccactccaatctcaccaccttggcaacggacatccgcgtcttgcaac

SEQ ID NO: 14656 - DNA, 312 bp, Zea mays
  Clone ID: LIB3159-007-Q1-K1-B10
ggcatatccattccatggatctcgcgtccctgctcctctcccagctgctgctgcttccgggggtaacggatgtctgcggcgagaccgccacgcacccgggctacgcgcacgctgaggaggcatgcatcggtatgctagaggcagaggcggagaaagcaacggtgctgatgcctgcgccggagcggcgcgaagagttcgacggcgggcggatcgtggacatcagccactactaccgtgaggacatgccggagtgggagtcatcacagggctccggcgagttcttgcatctggcgcggtccatgctcaacggct

SEQ ID NO: 14657 - DNA, 398 bp, Zea mays
  Clone ID: LIB3159-007-Q1-K1-B11
gactacgggcgggaagagagggaggcgcaatgggccaccgcgcataggacgctgcactggctccagccgccggaggcttcctccaacacgctgttcaacgacaagagcagctaccgcgagctgtccgagatcgccgagcaggccaagagacgagctgagatcgcgaggctgagggagctcaacaccctcaagggccacgtggagtcggtggtcaagctcaagggcctggacatcgacaccatccagcagaactacacggtgtgagagcccctctgctgcgatgtcgacgacaacacctttgctgcccgacgggagccatctgattacagataaaaattttcctagctgtaaagctctctataccaccagatactgccatatgatggtatggttgggta

SEQ ID NO: 14658 - DNA, 421 bp, Zea mays
  Clone ID: LIB3159-007-Q1-K1-B9
ggcttccactccactccatcgaattattcatccttcgccgtcgctccgcaccgctctggaactttgagaccttccttcctgatataggaaggcagggttcatgagcggcggcacgcctgcagcaagcagtagcctgcgggcagcactctcatactgcgtgaggcaagtccgcgcctatgactaccaccactacctctgccttctccacctggccccggccgtgcgcaaggccgcgttcaccttccgcgccttcaacatccagacagcaagggccatggatgtggtgtccgacccccggaccggcctcatgcgcctcctctggtggaaggaggcggtcgacaaggtctttggcaacaagctggtcgagcacctagttgcccacgcgctctcttcggtcatcggagaccataaggtagcaagc

SEQ ID NO: 14659 - DNA, 395 bp, Zea mays
  Clone ID: LIB3159-007-Q1-K1-C2
ggttttggttctcttccagccagccaccgtatatcgcgcagcaaagctggcgtcacgcgcatcgttcaatgcgttgggagagatggcagaggatacgcaaccagaggccgccgcagccgtcgtcgcgcccgccgcgtccgaggtagtcgtgaccgaagctgcgccggcggaggcggatgtgcctgctgctgcggaagctgaagccgaggccaaggatgagaagaaaggtgacgatgcggagctcaccgccgatgacgcgggggtggtgaccggctcgttcaaggaggaaagcaacctggtggaagacctgccctacccggagaagaatgcgctcgacgagttcaagcagctgatcgctgccgtcctcgccgcatgtgagttcaacctgccttccc

SEQ ID NO: 14660 - DNA, 434 bp, Zea mays
  unsure (1)..(434): unsure at all n locations; Clone ID: LIB3159-007-Q1-K1-C4
ctgggtatggaatctgcagttgtgatcatagatgattctgtaagagtctggcctcataacaggcacaatttgatagttgtagagagatacacctatttcccctgcagcaggcgtcaatttggccttcctggaccatcacttctagagattgacagagatgagaggcctgaggatggtacccttgcttcttcacttgcggtcattgagagaatccaccacaattttttttcacatcctaacctcaatgaggctgacgtgcggagcatactagcatctgagcagcgaaggatacttactggttgccgtattgtctttagccgggttttcccggttggagacgccagccctcacttgcatcctctgtggcagactgcagaacagtttggtgcagtctgcacanacctggttgatgatcgggtcactcatattgttgc

SEQ ID NO: 14661 - DNA, 443 bp, Zea mays
  Clone ID: LIB3159-007-Q1-K1-C5
acgctctcctcgcgccgtcgccgcgtctcctcctgtacaggtaaggagaggaagacggcgagaggtggaagcacaacaacgggatccccaaccggcacttcaagaagcactggcagaactatgtcaagacatggttcaaccagcccgcccgcaagcagaggcgccgcatcgctcgtcaaaagaaggctgtgaagatattcccccgcccgactgctggtcctctacgccccattgttcaatgccagactttaaagtacaacatgaagtcaagggctgggagaggctttacccttgaggagctgaaggctgctggcatcccaaagaagcttgctccaaccattggtatttctgttgatcaccgccgcaagaacaaatcccttgagggactgcaggccaatgtccacaggcttaagacatacaaggccaagctggttatcttccca

SEQ ID NO: 14662 - DNA, 435 bp, Zea mays
  Clone ID: LIB3159-007-Q1-K1-C7
cgctcggcatcagctctcgcaagcgcgccctcctccgcaaggaggtgctcctcgccggcgggtactggagctacgatggtccccgcggggagatgcttaccaagcgcaagggccacaagtgcgaccgcatctccgacgagaagcgagcaaatactgttgagctgatgaataagatgccccagatgctgctcgactacaagaaacgtaggtgggagaagaagatgaaagctgaggatagcggcaagaattgataccactccgctcgtccagtgtgcttatcttcctaaataaagtccaaactttatccaggaggtttgcaggacggttagattctgacgcgtcattaccttgaggattccttctctcctgagatgcgactttggacgcactatcctgattgtgatgctttccaacacttgtgccactggatcgtga

SEQ ID NO: 14663 - DNA, 386 bp, Zea mays
  Clone ID: LIB3159-007-Q1-K1-C9
gccaagcattctcacgctagctgttctcttcttgcctcatccatcgtgcatctatatggtcggcgcgagttacgtctttttcgtcgtccggccggcgagcattttgcttctgtgatcgatcggcgcgcgcgacgtacggccatggagatgatcgacgcagagctgcgtctgggtccgcccggcagcagcaacagagacgtcatcaacgtcgtgcagccttcgttggcggcggcgaaacggccgtcgtcgtcggtggtggagagcgaggcgtccgggacggacgaccatgaccatgacgacgccgcaccgacctccaagtaagtctcggcagccgcgcacatggattttcccgttcgttagcaggcagctagcacctgagctgatgc

SEQ ID NO: 14664 - DNA, 446 bp, Zea mays
  Clone ID: LIB3159-007-Q1-K1-D1
gagagacactcgtcccccgtaccgtggcggaggcagacgtggtggttacaggaatgttgagtggggtgatgactctgagaggccaccacggagaaactatgagcgccacagcgggactggccatggctatgagatgaagcgtgatggcgcagggcgtgggaactggggcactgccactgatgagcttattgcccaggatgcagaggactctccgaagatggaggaggctgctcctgttgctgagaaacaaggtgagcagatcgatgccccagcagcagatgagaacaaagataacaaggatgctactgcaaatgaggaggaagaaaaggaagaggacaaggagatgactctggaggaatttgagaaaataagagaggagaagaggaaagcactacttgcgttgaaggcttaggagaggaaagttgaagttgacaaggatctgcgtt

SEQ ID NO: 14665 - DNA, 423 bp, Zea mays
  Clone ID: LIB3159-007-Q1-K1-D3
ctggtgtatatacgcgacatcaaataggatgaatggggcaatatgtatgacgaggaaaagggggggacattggttggggaaatggttatctaccaaaatggggcggtggagatcattggaacgctacaaatccaccaaatattcaatcttgaagtatcagtaacagcaccaaatcatatggccaaaatcagtcttccacttggaataatccaaaagataacaaaccatctgtttgttaacatggtgatccttgtacaaacaatgtgtcttctactgaacgttaatgactacacaatgattctcggtcaagtaagatgacttcttatgacactgagaataccactcattgctgtgacagcaatgagatagcatcttgcttctatgatgtctgttaatgaatacaaattgatccatggactaaca

SEQ ID NO: 14666 - DNA, 390 bp, Zea mays
  Clone ID: LIB3159-007-Q1-K1-D4
acagaaaagaccctgacagtccgacacccgcaagccacaaagtgcagcctcgttgctacagaagttctgataaatgtctgagcttgccggaaagcgcaacctgcgcagtggccgcaactgccaccgcaagcacgtcgaggacgggtaggttcatcggtctcgtcgccgggttttcaggtaaagtcaggtcatgccaactctgtcgaagaaggaacatccaagaaaggaaggaggtgggcggcaatggaggatgcgatggcggcggacggtaagagcgtgctgcaagggcggtaccagctggggcgggtgctggggcacggcaacttctggcggatgcacgcagcgcgggacctgcgcacgggccgcagcgtcgcagtcaaagtggtggcc

SEQ ID NO: 14667 - DNA, 424 bp, Zea mays
  Clone ID: LIB3159-007-Q1-K1-D6
cgcacccaccagaggaaaagggcaaaagccaaaaggcatcaccgccgcgacgacgatggcggcgtcgctccaagccgcggccaccctgatgcagccggccaagatcggcggccgggcgccctttgcctcgctgccgtcccgcccgtcgtcgcaactcgcctgcagggcgttcggcgtcaacgccggcgccgccaggatcacgtgctccctgcaggacgtcgccagcaggtgcgtcgacgcctcgaagctcgccggcttcgcgctcgccacctcggcgctcctcgtctcgggcgcgagcgcggagggcacgcccaagaggctgacctacgacaagatccagagcaaaacgtacatggaggtgaagggcacggtcactgcgaaccagtgcccgaccatcgacggcagcgtggagtcgttcccggtc

SEQ ID NO: 14668 - DNA, 439 bp, Zea mays
  Clone ID: LIB3159-007-Q1-K1-D7
gcatccttgcgcaggatcagtatggcaactatgttacacagcatgttctagaaagaggaaagtctcatgagaggagccaaattattactaaattggccgggcaggttgttaccatgagccaaaataaatatgcatcaaatgtgatagagaagtgttttcaacatggtgatattgcggagcgggatcttctgatcagacggattgtggagcagacagagggcaacaacaatttattggtctgtttggtagtgtagtaaaagtgttccctccattatcccttcctctctttgccaaacgggtcggggttctggaaggtagggctaggacatggagacctgatctcagttcggtacagccaatcagataacaccatgagtatctcagttctgctattccagctttctgggagctgcgaatcctatggattaccaagacatgg

SEQ ID NO: 14669 - DNA, 408 bp, Zea mays
  Clone ID: LIB3159-007-Q1-K1-D9
gaaggaggctgcttgggccatctcaaatgctacctctggtggttctcatgagcaaatcgagtacttggtgtctgagggctgcatcaagccattgtgtgaccttcttgtctgccctgatccgagaattgtaacagtttgtctggagggtctggagaatattcttaaagtatggcagcatgacaagaccatgggtgcaacaggtgacactaatgtcttagctcatatgatcgatgaagcggaaggcctggaaaagatcgagaacctacagagccacgataacaatgaaatctatgaaaaggctgtgaagcttcttgagacatactggatggaggaggaagataacgcaattgctactgccggggaagctgctcctgctgtttttgacatttaccaaagtggcaacccttc

SEQ ID NO: 14670 - DNA, 375 bp, Zea mays
  Clone ID: LIB3159-007-Q1-K1-E1
ccgagaccaaatctctgttagtggccaaaaccctatatttagggttaggtaaaccctaaccgcggagattaaaaatattcggtctattttaatctatctgttctcgggtgataaaccaaaaaaatatttcaatcatgttcatccgagacttttctgtgatctcataaaactgatgccgattaagagatctaagattcttaagactgcttttataccattgttaaaatctatactgcctatgatcgattcctaaatccctataataccaatccgtctttcactgaaacttaaatcttaatgacccgtagatctcatctactatctactgacaggtactgtgaaacacacctttattgtccatgctatcttgatacc

SEQ ID NO: 14671 - DNA, 406 bp, Zea mays
  Clone ID: LIB3159-007-Q1-K1-E10
cagccattctgtcaacttatgcgaaggcaaaatctagggcaaagaaggacgcagaaaggaaagctaaccaggagaaggccacagaagaggcttctggttctacctcaagcaagacggctaaagctcaggagaaggatgctgatgcaatgcaggttgacaatgccagtgagaagaaagctcctgaaccagaagcgacttatcagctccttacgaatccagctcgcgtgatccctgcccaggagaagttcatcaagctccttgaaaacagccgatatgtacctgtgaaaccagcgccttctggattcatcctcctccgagacctgcagccgactgaggctgaggatcttgcgctgaccgatgcccccacaacagtcgcaggaagcaccggcaacactgcccctgctgc

SEQ ID NO: 14672 - DNA, 406 bp, Zea mays
  Clone ID: LIB3159-007-Q1-K1-E12
cggacgcgtgggcgcggtggtgcagccgcataccttcccgcccttcgaccgcctcggcggcggctcgtccccggcgtgcggtggcctccccggcacctcgtcgggcggcagcagcattccagcgttcagcatgccgggcagcggcagcagcagcctccccggcgggtcgttcttgcccggcagcagcggcagcatcggcagcatgcccctcttcagcggcggctccccggccttcagcggcttccgcggcatgcccgggtcccccgccgccggctccgccgtccccgtgcacggtaactagccctgaaaattcgtccgtcgccggagcacattattgatccaacttgtgccctagtactcctttgtctgcattatattggagagttggtattgcgtttcttttggt

SEQ ID NO: 14673 - DNA, 300 bp, Zea mays
  Clone ID: LIB3159-007-Q1-K1-E7
acgctgacactttttcagtcacagaggtacgaggaaatggttgacttcatggacatcgtagcgggagctgttgactctgaagagctcactgtcaaggatcgcatccttctgtacgatgcatacaagaacgttattgtaaccattcgtgcctcatgacgcatcatttccttcatcgatcacatggaggaggatcatgccaatgttgaccatgtaacactcatcaataactacctcccaactattgaatctgacctcaacacatatctattataacatcctcaatctatatgaataatatct

SEQ ID NO: 14674 - DNA, 383 bp, Zea mays
  Clone ID: LIB3159-007-Q1-K1-E9
agaaaggatggaaagggagctggagataaagagaatgcaggcagagttactggcccaagctaaagagaatgaatcatgattgtcatttgtccaatggtttcaggcagttcctttatcgtatttcctctgctgtattttccatgcaatatcttgactgatgtatgctcatgctcagcacctccaataaagcgagacatgctatagcattgttgaatgcaagtgggtatgcagtttgcagtatgcttatgttgaattgatgtaacttagccgaactgaaagaggctgccccagcttgattggaacagaggaatttgctgctgtttttgttcttattacggaacaacacaagtcaactctaaaaaaaaattgtttatgagtctggt

SEQ ID NO: 14675 - DNA, 400 bp, Zea mays
  Clone ID: LIB3159-007-Q1-K1-F1
gagaatagaaagaccttccttccatccatcccacagtcagtcgttgacacaaagagaaattccgagccggtgggcaaggctttaattgccccctctccctccctcgcctccttcaccatcccaccgagctttgcaacagctagtagcatgggcaagctgtgctgcagccaggaagacgacgagccggcgttcaacctcctggggctgctcgtcaccgtcgtcctcgccctgctcctgctcatgctgtgcacgccgccccgccgcaggcgctgcgtcgcctactacccccgttactgctaggacaggacggacgcggtggcggtggcacacgccgtctagcttcagccttcttcgaggtatggaggaaaggatcaatcttctgctctgctctgcgatgggc

SEQ ID NO: 14676 - DNA, 318 bp, Zea mays
  Clone ID: LIB3159-007-Q1-K1-F11
ctcagttccaaccccagctcctcagttctcgtcatcgtcctcgcgctcattgtcatttgcagtttccggtagcaggcatggcttctgtgcatctgtctgggccgcgggtggtggctgctgctaaacctgctgcgttgggcgggctcctcctgacgccgtcccttgtggtgccaaaggggctgagggccatgggcctcttgttgagggccgtcactgtcgtgtcacctaagtattctttcataaaaccattggtagacagagttcttgtgaaaatcaaaacctttgatgctaaattctgatggaggtattttacttttc

SEQ ID NO: 14677 - DNA, 329 bp, Zea mays
  Clone ID: LIB3159-007-Q1-K1-F12
ggccccgcttcttgttcgcgggcggcgctttgtgccacggcgggctggactaggcctcgatcgtttcgctgccgagggaggaggctgcggcggcgggcggggactgcgccgtgtgcatcggcgagctggccgcgggggaggccgtgcgggtgctgccccgctgcggccacgcgttccacgtggagtgcgtcgacatgtggctgcgctcccactccacctgcccgctgtgccgccgccgcgcggtcgtcggcgacgactccttgccgtgggcgccctaggcggacccggacttgctcaactttcccaccaacgttctttttttttgtttc

SEQ ID NO: 14678 - DNA, 393 bp, Zea mays
  Clone ID: LIB3159-007-Q1-K1-F5
gccatacttttctcaatctcacacctccctttcaagaaaatccgcatggattgcacctgccgatgcactccaccaatgaggatccctgaaaccatgcaaaatatccatgcctgcgagaactggctgccaagacgggtgatgagcgcctggcgcatcggcgggatacttcacgccctgtaagggtggaccgtgcacgagtgtggtgacgccatggtgcatgctgacaaagcatggtcagctgctattaggcacggattcgttcctttgacgaaagcctgaaagcctgcgaaacccggtgttctgtggctggtgcctgcgatagatatatgtacgcatatcttgactccattcgacgatggcttggaaaactacatttcatcaaatccgtatcac

SEQ ID NO: 14679 - DNA, 296 bp, Zea mays
  Clone ID: LIB3159-007-Q1-K1-F6
aggaaacatacacgtatttctgcccgccgttttggcaaggaagcggaagatgcatctggggtgccgatacatggaatggggggtgagaccgaagcagcttccatctcggcttaggcaaaaggtacgcaaatattatcgcgaacgctcggccgccactacgggatactatgagatggaaatgaacactgatctgcctcaaagactgatgcggcacataaatcgctacctctgacatcaactagttaagcaggttccactattacatggcatggacaattctgatcctgcataacatt

SEQ ID NO: 14680 - DNA, 409 bp, Zea mays
  Clone ID: LIB3159-007-Q1-K1-G12
aaccccaccaccagcagcagacagcagatgcattgttagttccgaaagcacacgtctcgcattagctacttccagccttcgtccaggacacgagaggaaaccgcagccatggccaacaaccgcacctacgaggagcatacccccgccgtcgagtggagccgctccgccgccgaggccgacgccgtcaagatctcgctcccagggttcaagagggaggacctccgcgtgctggtggacaaccacggccacctgcggacgcgcggcgagcggcacctcaccggcaacaggtggatccgcttccagaacgacttcgagctttccgccaactgcaacgccgacggcatccgcgccaagttcgagaacgagacactcaccatcacgctcctcaagaagaccccctcgacgccca

SEQ ID NO: 14681 - DNA, 311 bp, Zea mays
  Clone ID: LIB3159-007-Q1-K1-G2
cctcgatcccatctcccaacgcccccgcctcgcctcgggatcccgccgccgctccatctgggtgtgctctcccacccgcaggcagcgagcgacatctactgctatggatggccaatgccatgttgttggcgaatcagaaacatgctctattttcaaacggcggcggtaaccactcgctttatttcaagctcgtccggttccttgacctctaggcctccttggacaatgaccaactgctgtacgcgtagcactggatccttcagtctatggggctcatatgcagacttctctggtgagccgacaccctcttt

SEQ ID NO: 14682 - DNA, 366 bp, Zea mays
  Clone ID: LIB3159-007-Q1-K1-G4
caagaagcagacccagggagaagtgaccaagtgtctcaagcaacctcccgtccttcccgccgcggcttcctcgtttctctcctgcaatccacacccacccaccactctcctcttctcttctctcgaaaaaagaaccagctagcgagcaatccatatccccgccatgtccgcttcgcctgagttctacaagccagcgccgccggcgttctctccgccgacactcctcctgcacggtgcaggggcggacgacagcgccgccgccgttaccatgttgcaagaggattcatgactaccgtttccggactccgactggcggcgagagccatgtgaagccgcccggtactttcccgcctgctccgcagaagc

SEQ ID NO: 14683 - DNA, 393 bp, Zea mays
  Clone ID: LIB3159-007-Q1-K1-G5
acgcagcccgtcagcccctctcgattttcatccgtcttcgcctccaaccgcgtgcgctccagcggtgcttctggaaagcgagagcttcttcataagaacaacaaatcaaaagcttgatcagctcggtgcctacaaaacctcaacaaccaagtttcatgtctgatctcgacgtccagcttccatctgcctttgatccgtttgctgaggcaaatgctgaggactctggtgctggtcctggaacgaaggattatgtgcatgtgcgcatccagcatcgcaactgcagaaagagtctgactacagtccatggtcttaagaaagagttcagctataacaaaatccttatggatctgaagaaggaattctgctgcaatggttctgtagttcacgacccat

SEQ ID NO: 14684 - DNA, 170 bp, Zea mays
  Clone ID: LIB3159-007-Q1-K1-G9
ggaaaaatatccccaaaccctagctcccgatctcgatggcgaaccctcgcgttttcttgtacatgaccgtctgcggcgccccggctgtccggatcgtgattgagctgtactccaacgaggtgcccaagaccgcggagaactttcgtgcgctgtgcacgggctaaaaaggt

SEQ ID NO: 14685 - DNA, 326 bp, Zea mays
  Clone ID: LIB3159-007-Q1-K1-H2
tgacccaataactaagtcagaatgcatctcttgtttctactcgctggtaacccaacactaacggggggtactatttctggtagcgcagcaccgaatcacattcaaggattccagtcctatcctgccaatggagttattcttgatcttggttggcctccacttcacagtggtggtgtccgacacctccaccttgcacagtatactctttcacaagactgacgacgacaaaattttggtcctcgactcgcacacgctcttgggctcattatgggagcctggtgacctattgctgtttactgtgtctatacagaagaacctacacctgt

SEQ ID NO: 14686 - DNA, 458 bp, Zea mays
  Clone ID: LIB3159-007-Q1-K1-H4
gcggcgctggtctggccggccatgtcctgcctcgcggcgccgtcggctgcaccgacaaaggcgggggagcgcatgctccgcgccggcgctcctttgcactcgactttgccgtgccagggcctgcattacacggcgcggtggactggagggcgagaaacctggtgcgggcggcggcagatagctctgctgcgcagactaccatctggcaaagtactggcgaccagggacggatggtctctccactttctgaataagtgaaggtccagagacgatccaggactccgctcaaatgctatcggaggagacagaagaaacatcatgagccgacgcaccaaaaatcttcttctgatggaacaggctatgacggctgctagtgccgcagcgtattcgaactagtgaaagctaagattccaaccctgaacgaaatgaaacgcctgagattccatcaagtattccat

SEQ ID NO: 14687 - DNA, 437 bp, Zea mays
  unsure (1)..(437): unsure at all n locations; Clone ID: LIB3159-008-Q1-K1-A6
gagcaacctccttttgacaagaaatcatttgtgtcttacatcaaaaaatacatcaagaatctcactgctgtgttggagccagagaaagcggatgagttcaaaaagggtgtcgagggtgcaaccaagtttctccttagcaagctgaaggacctccaattttttgttggtgagtccatgaaggatgatgcgtctgtggtattcgcctattacaaggatggtgccactaatccgacattcctctatttctctcatggtcttaaagagatcaagtgctaggcgtgcggcgaaattagttacccatgttgggtactatctatgtactattattatatccaaaactatagttgtcctggctgaattgaactcaaaagggtttgtttgagaaaaaattgtcccaagattggattgcttgttaaagctcaatatntgtattgaaa

SEQ ID NO: 14688 - DNA, 159 bp, Zea mays
  unsure (1)..(159): unsure at all n locations; Clone ID: LIB3159-008-Q1-K1-A9
acgctgcacgcanctcantctcgtccatccagtgctgtagaattttctttggtctgttggcagcgcagccatgaaaccccctcatctgccggcaggggagggggcctcctgggctcacgaggtcaagcaggccctccgtgagaaactacggcgctccta

SEQ ID NO: 14689 - DNA, 302 bp, Zea mays
  Clone ID: LIB3159-008-Q1-K1-B1
ctgcacgcagctcagtctcgtccatccagtgctgtagaattttctttggtctgttggcagggcagccatgaaaccccctcatctgccggcaggggagggggcctcctgggctcacgaggtcaagcaggccctccgtgagaaactccggcgctcctacggcgccggagctgcctccgccacaccggaggccaggccggccggcgaaccaagccgtggcgctgagtgccgcggctcggcggccgaagaccccataaggagagtcatgttcttggctccctggggtcacacataagaacacaaac

SEQ ID NO: 14690 - DNA, 238 bp, Zea mays
  Clone ID: LIB3159-008-Q1-K1-B12
acggtgaaaaggaagggaaacaacataacaaattgcaaagaggcgtctttcaagcttgtgcgtgactcggatcggaggagcatccccgcctacgtcaccacaaccatggatcgcggatcgctaggcaagcttgcgttgcgcgccctctccgttgtcgggagatggtagcaccagcagcttcgccgcctcaacatccacaagtaccattgtgctgtgttgatggagaatgtacgtgatc

SEQ ID NO: 14691 - DNA, 455 bp, Zea mays
  Clone ID: LIB3159-008-Q1-K1-B4
gcgggtcctcctggcgcacctcctccccttcccctccgccacctcctcacagcctcagctggcggcgtctgcgtgcgcggccggggatagcgccgcctaccagaggtcctcctccttcggggacgatgtcatcacataagcacattctagaaagcacaggattgtcttctgcccccatgggaattacttctgaaaatgttgcccatcgatatggtgtaaccagacaagagcaagatcaggccacctctgagtctcataggagagctgctgcagccacgacctctggaaaattcaaagatgaaatcgtcctcgtgccaacaaaagctagaatttctttctctctctttgcctaatccgtatttgataaaccaatcaaactgtgtaggcaaattcagtcaagtttagtgaatggtcctggagctgttcttctcatgaaaagatctggtgcttctaaa

SEQ ID NO: 14692 - DNA, 380 bp, Zea mays
  Clone ID: LIB3159-008-Q1-K1-C1
gcactccaatcagatcatcagatagatcactggccccgtgctgattagcgcgcttcccatctgagcagccagcctcccagggtacagggagagacgcagaagagacagctgctgcctcgctgagacgatggccggaggcggagaccactcccagacgaacggaggccacgtcgaccagagggccttggaggagggcaggaaggaggagttcgctgaccagggctgcgccgccatggtcgtctccgtcccatttatccagaagatcatcgcggagatcttcggcacctacttcctgatgttcgcggggtgcggcgcggtgaccatcaacgcgagcaagaacgggcagatcacgttcccgggcgtggcgatcgtgtgggggc

SEQ ID NO: 14693 - DNA, 400 bp, Zea mays
  Clone ID: LIB3159-008-Q1-K1-C2
gcagggccttcaagtgcttaagattttcaaggatcatgtctgcaagacatccatactggatgacttcggcttttatgataatcgtgagaagatgatgcaagagaggaaagccaaacagcagcagtcgctgaaaaaggtcattgatgtgaagctgcccaacgtcaccgacatggagagaagtcctataggagagactggatcaacagaactcactggggttgagactgacgtcttgaacaaagagcgtttattaggcaaagcaggagagaaaaatggcgagaaaggaaatgatgtcgccccacaggatccgaaaacacaaactgagaagttggcgggtctaaatggctgttaatatttttcgttagctcaagccgttgacagtggtgtcggggtggaacct

SEQ ID NO: 14694 - DNA, 450 bp, Zea mays
  unsure (1)..(450): unsure at all n locations; Clone ID: LIB3159-008-Q1-K1-C4
ctcaaacacaagcctcagatctcagtcacctgcgccgccgcttcgttcgtgtggaggggagaggagaggaaatggcggcgaccgagggcgtgctcctggggatgggcaaccccctcctcgacatctccgccgtcgtcgatgacgccttcctgacaaagtatgacatcaagctgaacaatgctattctcgctgaggagaagcacttgcctatgtatgacgagttggctagcaagagcaatgttgaatttattgccggaggagccaccccaaactctatcanggttgcccaatggatgcttcaaactcctggtgcaacaagttacatgggatgcattggaaaggacaagtttggtgaggaaattgaagaaaaacgctcaagctgcaggagttactgctcattactacgaggatgagactgcttctactggcacatgtgctgtatgttgttgt

SEQ ID NO: 14695 - DNA, 377 bp, Zea mays
  Clone ID: LIB3159-008-Q1-K1-C5
aaaaaaaaaaaaaaaaaaaaaaaaaaatttaaaaaaaaaaaaaggggcggccgctcgggggctagctgggtgcaccatggtaacatcgatgttgtccttagccatagggaaatctgtgaagaaagacttggcaatgactggtgaagtaactctaacaggacgaattcttccaatcggtggggtgcaccgatattttcagtcaaagaaaatgttgatttcatgattgtgcctgctcgccttcaggttctagacttcttaaatgagtgaaggagaaaaccatcgctgcaaggagaagcggggtaaaaaacaatcattatcccatcagcaaaccgaagggattttgatgagcttgcttctaattgaaaaaaaagtcttga

SEQ ID NO: 14696 - DNA, 242 bp, Zea mays
  Clone ID: LIB3159-008-Q1-K1-C7
cctagcaaaggtggacggcccgagttctactacgaagacggaatgtaccctgaacaccgcgattgtgttggccaaaagaatcagatcgatgctgctaaagctgctggagtgaagcatattgtgctggtgggatctatgggaggaacaaatcctaaccatccgctgaacagcatgggtaatggcaatatactggtatggaagcgcaaagcacaacagtttttggcagacagtggaatccctta

SEQ ID NO: 14697 - DNA, 331 bp, Zea mays
  Clone ID: LIB3159-008-Q1-K1-C8
caagcagaataataggtggatcacacttggtaaattgcctgagcgatctgtgtccatgaagggatgtggccttgcattcagggcatgtggtgagaggcttattgtcattggtggcccaagaacgccagttgggggaacgattgagctaacctcatggattcctgatgacaagccacctgtgtggaatctgatggacagacggccatttggaaattttgtgtataattgcgctgatgagctgctgagttcactttatcaaggattctgcaaagtgatgtttacaaaaagaggtattcacaatggaagggcttgttagctttatcacttcatg

SEQ ID NO: 14698 - DNA, 367 bp, Zea mays
  Clone ID: LIB3159-008-Q1-K1-D1
agccttccggccaggtcggggttttccgggatctccatttcatcaacaagccagaactgtgcgtccaaggcttccagcagccacccaagtttgacagcgatggaaatctggtcgatgctgaaatcagagagcggctcaagaaagtgctcctatcccttcaggccttcacgctcaggcttcagaaggaggactgaatcaactcggtaccattgtagtacgtgcttccctgagaagcgtttattgctcttggaagtttgtaacgcgttgctgggtggcctggaagtttgtaataaatccaagaagtgttctcgctgaatatttaagatttgatcgcatctatatattaataaagatgtgttctagcgtt

SEQ ID NO: 14699 - DNA, 389 bp, Zea mays
  Clone ID: LIB3159-008-Q1-K1-D2
gctggttcctttttatcgacacaggattgcttgttaatctggcgcgcctcacatgtgtgcggcggcttgctcatatgatcggcctctctctcttttgcaggtgttcatcacttgagctcatatcatcgtcagaggcaggcagcagtaagcagattccgctgttgctgagcattgtcgtcgtgggcgtggcaggccagttcgcgtggagacggggagggaacatctggtgtgcgtttgctaaccggggggcggccggcgggtggaggcgaccaggcgaggactgctctgcggcggcaaagggtttcaaaatgctggcgtgcatcgcctgctcggccaaggacggcggggatcaggacggctcccgcgccggcacgccccacggaagggac

SEQ ID NO: 14700 - DNA, 372 bp, Zea mays
  Clone ID: LIB3159-008-Q1-K1-D3
cgtgcaggttgcaatcaaaaggctcggccaatgttcaggacagggcgtggaggagttcaggagcgaagccgtcctgatcgcgaagctgcagcacaggaacctggtcaggcttcttggatgctgcatcgacggagacgagaagctgctagtctacgaatacttaccgaacagaagcctggactccattatttttgatgctgcaagtaaacacctccttgattggccaacacgtttcaagataatcagaggagtatgtcgagggctcctttatctccaccaggactcaaggctgactataatccacagagacctgaagacgagcaacatactgctggacgcagatatgagccccaagatatcggatttcggcat

SEQ ID NO: 14701 - DNA, 384 bp, Zea mays
  Clone ID: LIB3159-008-Q1-K1-E11
cgccgcttccgtcgtctccgcccgccgaagccatgccgtcccacaagaccttccggatcgggaagaagctggccaagaagatgcgccagaaccgccccatcccctactggatccgcatgcgcaccgacaacaccatcaggtacaacgccaagcgtaggcactggcgtcgcaccaaactcggattctgagcggcggaagaaatgctggctaacgacgcctgggggtatagggctctgcaagttaggaagctcttgtttaattttttttttgcttgtgttatttgtcattgtaataccatgttttgtctgatggttaaagaaccgcctttatgctatgttgaatttatttaaccttgcagcgccttaatcagttgatctctagccc

SEQ ID NO: 14702 - DNA, 57 bp, Zea mays
  Clone ID: LIB3159-008-Q1-K1-E4
ctcaattttctcacctgtaaacgacgagcaggagccgtacgcagattatctgtacaa

SEQ ID NO: 14703 - DNA, 377 bp, Zea mays
  unsure (1)..(377): unsure at all n locations; Clone ID: LIB3159-008-Q1-K1-F3
ggcggaagcaaggcaagtcggtgagcgggaagctggacgtgaacgccttcgagtacctccaggagaagtactcccgcgagaagatgagcatccggcacagcgtgggcggcggcggcgatcgtcgcgcgacgcagtggctgggctaggccgtgcgtgtgtgtgatggtttgtgcctttggcttcatcagcgacacggcgtgggagttgtttgtgcttggtttttcgtagaggagaggagagagttgacatgatcttccccgtagcatgtgatgggtggctcttggtgtaacgttacgtactagctgcactgaactcgttgcatgtctttatcagtgctggaactggaagcagcagctgaaactgctgacaacgnanna

SEQ ID NO: 14704 - DNA, 180 bp, Zea mays
  Clone ID: LIB3159-008-Q1-K1-F4
gtgaagcatcatgttgtggcagtgttgcttgaattcttccacgcttacatttgcctgtgctagctgtttttttattgcaaggtgatggctatagatatcttccaagcactcgctgtttctttcctaactaccgcctttgttgtctggcatgtattcttaaacgacaatgtggttcagagt

SEQ ID NO: 14705 - DNA, 375 bp, Zea mays
  Clone ID: LIB3159-008-Q1-K1-G1
cttccggaagaagccaaggaaaaaatccaaatcttcgggaaaaccctgacggggaaaaccatcaccctcgaggtggagagcagcgacaccgtcgacaacgtcaaggccaaaatccaggacaaggaagggattcccccagatcaacagcgactgatattcgctggcaagcagctggaggatggacgcacgctggctgactacaacatccaaaaggagtcaactcttcatttggtcctcaggcttaggggtggaaccatgatcaaggtcaaaactctcactgggaaagagatcgagatcgacattgaacccactgactcgattgacaggatcaaagagcgtgttgaagagaaagaaggcattcctcccgtgcagcaa

SEQ ID NO: 14706 - DNA, 379 bp, Zea mays
  Clone ID: LIB3159-008-Q1-K1-G12
gtcattgttgtgaacaaatgggatacaattccaaacaagaaccacgagagtacaacacaggctgaacaagatgtaagagaaaagcttcgcatacttgattgggcacctattgtctactgttctgcgacaaatggcaccagtgttgaaaagataatttctgctgctgctttggttgagaaggaaaggtctagaaaactcagcacctccattcttaatcaagttattagagaagctatagcattcaaatcaccaccaagaacaagaagtggcaaaagaggtcgtgtctattatacaacacaagctgtcgtcggtccaccaacattcgttctatttgtaaatgatgcgaaactctttcctgacacgtaccgccgttacatgg

SEQ ID NO: 14707 - DNA, 431 bp, Zea mays
  Clone ID: LIB3159-008-Q1-K1-G5
tttattattatcatcacatccccagatcctccctctggtgcctgacgtcatacatgtctttcgcgcaagtggtggtatccccagatgagagcgatgaagtgaaaacaaatattggcaaggctatttctcacttgatatctgtctatggccagcaaatgcagccaatactgagtgcccttccaccagcccatgcaaacgcgctggcttcatttgcgagtagaagatgaccttggaggaccagcttttctttggttccttgttctgcttgattttgttttggttttgtcgacgattgccattttctgaggatctggtcacatggatcaggccagatgggagtgcttgcattgcacattggcaagggcgagcggagttgtcaagttggcgcatgattgattatatggtgaagctggtttctctttgagatacat

SEQ ID NO: 14708 - DNA, 377 bp, Zea mays
  Clone ID: LIB3159-008-Q1-K1-G6
cccaattcgaaatcgaatcgggtccgacgggtcggtcttgccgtgcgtgcgtggctgcgcgggcgactcgactgcacccccgctcctcccagtccccacacactgcgcgccgccgccgggtcctcctagggtttcgccgcgatgtcgctccggccgagcgagcgggagcagatgcggaagggcaactacaagcagacggtagacgcggaggagagccgccgccgccgcgagggccagatggtggacatccgcaaggccaagcgcgaggaaagcctccagaagaagcgccgcgatgggttttccgcctccgccgccggtgtgccgccgatgggccactccaccgcgctccagcagaagctcgatggcttgccggcgat

SEQ ID NO: 14709 - DNA, 461 bp, Zea mays
  Clone ID: LIB3159-008-Q1-K1-H1
cttcgggaccggccaaccggttgaaccaggtggactacctgctgcgcaacggctggataccctgccgcgagttcagcaaggtcggcttcgtgtaccgcgagaactccacctccccgtgctactacgacggccgctactggaccatgtggaagctgcccatgttcggctgcaacgacgccacccaagtgtacaaggagctgcaggaggccatcaaatcctacccggacgccttccaccgcgtcatcggcttcgacaacatcaagcagacgcagtgcgtcagcttcatcgcctacaagcccccgggcagcgactagaccgcgcccgccggcccgcccccgccggctagctagctagctagctcctgcgtgagctagtagctagtgccatgcgtcgtctctgtcgttcggttttgcttcgggtcaccgtgtaccctttgcttggctggttcttctttccttttt

SEQ ID NO: 14710 - DNA, 375 bp, Zea mays
  Clone ID: LIB3159-009-Q1-K1-A4
tcgatctggtgatataattgagtttatagctccaagaggtggcttgtataatttcgggttccatgacccatatggagcacctgaaactgtttctttctacatccatgttgtgcacatacccaatgagcacaatctggcgaaagatgagcactcggaccctatcaacgttaaaatcgcggagctgaatgaagcattagaatccgtttccgtcgagcataagtacctaaaagcacgctaagctcgttacctacacaccaatgagagcaccatatatcgtgtcttgttctatacgatggcagagtacctggctttcatggctgatatcactttgtaagtccttttcattcgtcgctttgtcattaaaaattgtggtat

SEQ ID NO: 14711 - DNA, 57 bp, Zea mays
  Clone ID: LIB3159-009-Q1-K1-A9
gaagggcgcaaagaaaccccaagcaaacaaacagggaacagggagaggagaggagag

SEQ ID NO: 14712 - DNA, 354 bp, Zea mays
  Clone ID: LIB3159-009-Q1-K1-C2
cgcggcgctgagcacggcgctgttcgacgtgtggctccgctgcggcccgtgcttcgagaacgtgtgcttggagcagcccgggtggcggtcgtgccggccagggaggccctccatcctggtcacggccaccaacttctgcccgccaaactacgcgctcccctccgacgacggcggctggtgcaacccgccccgcccgcacttcgacctcgccatgcccatgttcctccacatcgccgagtaccgcgccggcatcgtccccgtcttctaccgccgggtgccgtgccgcaagtccggcggggtgcgggtcaccatcaacggcttccggtacttcaacccggtgctgatcacgaacgt

SEQ ID NO: 14713 - DNA, 158 bp, Zea mays
  Clone ID: LIB3159-009-Q1-K1-C5
cttcagggtttttaggacccctcaaaaaaaccacagatttacccttccaaccaaataccaatccccgttcaaaaagagtacaaatatttatcaccactgaccaacttaactaaacttgattcataatccattccacctttcaactaacaagaacaaaa

SEQ ID NO: 14714 - DNA, 358 bp, Zea mays
  Clone ID: LIB3159-009-Q1-K1-F3
ggttaagagggtgctgaagtgctttggtcctactgagttctctgttgccgtgaccatctaagatgatcgggacaatgcgaagacctgggggacgaaactggatgctgaggcctatgcttgcagcaacatggttgagcaggtgctgccgtttggtggcttgctcatctatcagagcttcactgttacggccgaaacgacccatgggtcgccgaggtcagtcctgcatgacttcgctggtgacattgtcaagaatcgctcagagagtgatgctccctgagaagctgatgctgtggatgagagcgaggaaagagatgtaaagaagatgaaatgctgatgtggtcgacgatagatcagattc

SEQ ID NO: 14715 - DNA, 77 bp, Zea mays
  Clone ID: LIB3159-009-Q1-K1-G2
gaggcacctcacacacacacactctctctctctccactggctgacgccgcgaccgccccaagccaactgcccttttc

SEQ ID NO: 14716 - DNA, 327 bp, Zea mays
  Clone ID: LIB3159-009-Q1-K1-H6
ctgactcatgtgtccgaattcccatgcaggcttgtcggcgaggacggcttgatgaccgaagagcgatctttgcgggggctcgggaccgtaacgtcacaggaccctataatctcagatccttcctgccacttcccgccgtgcccgtcaacacatctttcttgccggacgcgctcaacgtctgctctctcctcctacagggggatcggatacaccacatgctgcgcgttagtgctctgggtcttgtgctacggttcactcatttggaaccccggctaagactattacgacaaaatactccgtttcatctaaggctacaagcgcaccttt

SEQ ID NO: 14717 - DNA, 445 bp, Zea mays
  Clone ID: LIB3159-010-Q1-K1-A12
ccactctgcccaccgagcgccagtggagcgcttacttgacttgacctcgccgcctccgggcctccccctccccctccccctgccggcgcccgttctttcctcccctcgccggacgcccaccgccggagcggaagaggggggaatgcagccgccgcagcaatacccgccggcgcccggctcctggggcggggtcgcgggggccagggccggcgccaccaccgtggatgaggcgtccatggaacgtagcaagagcttcatcaaggccctgcagggtgctggacaacctgaaagactatgccttacgagccgtcgtcaacgcggttgatcatctgggtactgttgcgtacaaactgaccgatcttttcgagcagcaagcttccgaggtgtcgacatatgaactgaaagtcgcacgcctgaaccagcaaatcttcacatgccaagtcta

SEQ ID NO: 14718 - DNA, 246 bp, Zea mays
  Clone ID: LIB3159-010-Q1-K1-B12
tgtctacattattttgtctcgtcaacattgtctattattacttaagcaatatggctgtagctactttaaaaggacaagcactgtcttattagttcggtatcaattttttttaaactagtgctaatactaacctgtatgatgatcaagtgtttttctccattttacgtgacatcattcatttgcttgcttatactgattcatagccttaggacaatgcattcataatttatatgccataccagtgtt

SEQ ID NO: 14719 - DNA, 363 bp, Zea mays
  Clone ID: LIB3159-010-Q1-K1-B3
gcctccctttccccttccctccctccctctccccgcgggccgccagaagcaatttcaagctggattcgaccccgattcgtccgcccgccaccgggattccctccgccaagcgcggatctgaacgctgcgctccgtgtcgccgctcgaatccgccatgaaaggggccaaatccaagggcgccgccaaggccgatgccaagctggcggtgaagagcaagggggcggagaagcccgccaagggcatgaaagggaaagccggctaggaccccaacatgcctaagagggctcccaccgctttcttcgtgttcatggaggaatttcgcaaggagttcaaagagaagaaccctaagaacaagtctgtcgc

SEQ ID NO: 14720 - DNA, 111 bp, Zea mays
  Clone ID: LIB3159-010-Q1-K1-C10
agcccttaattatataattatttatttttttcactaaatatttttctcttttttctactcgatttttttaaatttcttatataaaatacaattcaactaattattctttat

SEQ ID NO: 14721 - DNA, 230 bp, Zea mays
  Clone ID: LIB3159-010-Q1-K1-D5
gttctcaccccctccagctctccttcgtcggccatgggtcaagcctggggtaatgtaggagataggctccaagggcgtcgatggaaggagcaccatgtgaggaagatcaccgacatagtgttcgaccgactcacagatgacgcctataatctcgtcatggaagccctcttattcgaggaggtcttcatcgccgtccttttcgtctacaatgacatcaataagctctttcc

SEQ ID NO: 14722 - DNA, 249 bp, Zea mays
  unsure (1)..(249): unsure at all n locations; Clone ID: LIB3159-010-Q1-K1-E3
tgctttttcctaggcatagttctgatagttatattctggctgtatacatgaagcatcatagcttgttctggttgagaaaaatcttancctaaaaaaaaaaaaaaaaaaaaaaaaaaaaaaaaaaaaaaaaaaaaaaaaaaaaaaaaaaaaaaaaaaaaaaaaaaaaaaaaaaaaaaaaaaaaaaaaaaaatgggcgccccctttaaaaataccaatctttcttacccttgcatccaaactattaacttt

SEQ ID NO: 14723 - DNA, 351 bp, Zea mays
  Clone ID: LIB3159-010-Q1-K1-E6
ctcaaacttggctaatgtgggtaaccgcaattctgctcctgggttggcagcttagccgatcttatgaaatttaagcccaagaatagcaagttctgggaatattttgggtgggagcaatattgggagaagtataagctctggaggactgtctatgcctggtattgcatctcgcatgaatttaagtggcaactctggtagtggggctatcaacattcaaagatccaaccgtattggtatgcttcaacaagcatccccacaatttatgaacttgcttggaagttcttacccaacacctggagggtcactatctcataatcaaatacagtcaagaagtggttctttaagatcttc

SEQ ID NO: 14724 - DNA, 289 bp, Zea mays
  unsure (1)..(289): unsure at all n locations; Clone ID: LIB3159-010-Q1-K1-E8
gcgaccgctacttgaattgctaatcatcgtacatagtaacccaccgcttcaccctgaaagaacattttactatgctgctcctccannctctcctcctctcagtatcagaagacctagcacgattctcgcttaataatctgcccttcgaccataacagccgcgtctccgctcacctctccaccaaagataggcatctccttcttcttctctgctccaacgccctgagctcaagcagcgactactactcctacgtcatctctctcaataactacatgaacacacagtactt

SEQ ID NO: 14725 - DNA, 229 bp, Zea mays
  Clone ID: LIB3159-010-Q1-K1-F1
gcatctgcctccttttccttggagccgaagaagagggaaaggaagggaggacagccggcggggccgccgccgccgccaccgtcaggatgcattccacgaacctcctgctcgaggagcccatccggatggcctccatcctcgagccctccaagcccagctacttcccggcgatgaccaaaatcgtcggcactctctggcccaagttgcgctccggcgacacgatcttcgc

SEQ ID NO: 14726 - DNA, 427 bp, Zea mays
  Clone ID: LIB3159-010-Q1-K1-G10
ggagaagctagcatatatagcccttgactatgagcaagagttggaaactgccaagaacggctcttcagttgaaaagagctatgagctacctgatggacaagtaatcaccattggtgcagagagattcaggtgccctgaggtcctcttccagccgtcgatgattggtatggaggctgctggaatccatgagacaacatacaattcaatcatgaagtgtgacgtggatatcaggaaggacctctatggtaacattgtgctcagtggtggttcgactatgttcccgggtatcgctgatcgtatgagcaaggagatcactttccttgcaccaagcagcatgaagatcaaggtcgttgcaccgtctgagaggaagtacagtgtctggataggagggtcgatcctagcctcgctcagcacttttcaacagatg

SEQ ID NO: 14727 - DNA, 422 bp, Zea mays
  Clone ID: LIB3159-010-Q1-K1-G12
cccacgcgtccgcccacgcgtccgacggtttgtttagtagtacaaccaattacgattcgccgcaagcatcgcaaccatctcgacggtacaatctattgttccgctatctttctagcgacatatggtagaatgccaccatgatcgtagtaagcaagctccacctcagtgtcgaagagatgccttggacccacaggcatctggagcttatatatttagaccagatggtaatacaccaactattgcctcatcatcggtgactcttaaagttatccgtggacctctatttgatgaagtccatcaacaattcagctcgtggatttatcagattacacgactctacaagaacaaggagcatgctgaagttgaatacacgattgggccaatccctgttgacgatgacgtatgaaaggaggttatcacac

SEQ ID NO: 14728 - DNA, 238 bp, Zea mays
  Clone ID: LIB3159-011-Q1-K1-A9
catcgatctgcaagtctcgctacttagcagtgcatttaataaagcagccgcaatggcgagcggcggcatggccctctcctccacggccttcgccggcaaggccgtgaacgtgccgtcgtcgtccgccttcggcgaggcccgcgtgacgatgcgcaaacggcggcaaggccaagccacggcggtcggacccgggacgcccacctgcgacggcatgcgagcgcacacagcatcgcacacg

SEQ ID NO: 14729 - DNA, 374 bp, Zea mays
  Clone ID: LIB3159-011-Q1-K1-B12
cctccatgttcccaaagccgccttctgggacgaatttttccccgaggatggtggagatgcggaggaatccgttgccgctggggacgacgaggacgaggacgagaagccgcggcccgagccggtgtcctcctccgagttccagttcgcggcgccacccgagggctacgtcgagcccgcggcgtttgacgagctaccgccggagtccccagaagacgtggcggcggcgtacgaatctctctacgggccggccttcagcggcgagacattgctggggaacaatgtctttgaggtcaaggtggtcgaccccatcgacatggaccgggagcagcgcccgaacgacgatttcaccgagcgcgtcgtgcaggtcaaccgcg

SEQ ID NO: 14730 - DNA, 480 bp, Zea mays
  Clone ID: LIB3159-011-Q1-K1-B6
agagaaggaaaaatatccccaatccctagctttttatctcgatggcgaaccctcgcggggggttcgacatgaccgtggggggcgccccagcgggccggatcgtgatggagctgtacgccaacgaggtgcccaagaccgcggagaacttgcgcgcgctgtgcacggtcgagaagggcgtgggcaagtccgggaagccgctccactacaagggctctaccttgcaccgcgtgatccgcgagttcatgtgccagggcggcgacttcacccgcggcaacggcaccggcggcgagtccatctacggctagaagttccccgacgagaagttcgtgcgcaagcacaccgcccccggtgtgctctccatggccaacgccgggcccaacaccaacggttcccagttcttgatctgcaccgtcgcgaccccttggctcgacggcgagcacgtcgtcttcggccaggtcgtctagggcatggacgtcgtca

SEQ ID NO: 14731 - DNA, 356 bp, Zea mays
  Clone ID: LIB3159-011-Q1-K1-C8
gttctagatcgcgagcggtcgctctttgttgttttttttttcgtccgtgttacaattcggggggttttacacaagagggtgcggcttctatctacctactatatagtacacgacctgcctccctagctcttgcactacgagcagccgcgcgcaaacgatcgatcgagcagtcctagtaatataccccacaaacaacctgccgtacggatcgacatgcttgaagagcacaaatctattgcgctcattgtggagactcagtgcatctaccctactctatcactctagtccattgcggtgctcaccgacgctatgagcccgctactgttaaacaaatacaggcaggccgactgcaccat

SEQ ID NO: 14732 - DNA, 539 bp, Zea mays
  unsure (1)..(539): unsure at all n locations; Clone ID: LIB3159-011-Q1-K1-F11
ccgtccggcccccggccgccccgcggttgggtctgtgtcgtgtctctcacctngcttcgttctggctcctacgagggtccagtacccaagccatcgcgccgcgcccaacnntatggcggcaaccgnngctctgctaccctccccagccctcnngcggcgctcaacggacaccgnnccgcgccgcnngcccacaggttggctgcnnagccgcagctccccagctccagcgccggctcccttgtctnnctcggtccctccggcccctccgcggcgtcggcggcttcgcggtctcggcccgtgcaagagacgaaggagggggaggccaagacggccgacgagataaccgagaagtacgggctcgagttcggcctctggaaggtgttcagctccaaggaggaagagggaggcgaggggaagaagtcgcggacggaccangccaaggaactcctggccaagtacggcggcgcgtacctggccacctncatctcgctctccatcgtctncttcactctatgctacctnctcgtcagcgccggcgt

SEQ ID NO: 14733 - DNA, 222 bp, Zea mays
  Clone ID: LIB3159-011-Q1-K1-F8
agcgcgcttggatgcaatgtctatgatacggttcttccgcctaccgtgcgaaacagggtggtttgaacaggtgggtggggcggccggagccatgggcctcctctgcgcagagctaattcttgtaacgatcatcacacacgatgcctggtcggcagaagacaacgttttccacaacatggacaacaccgatatgctcaacctgaagtacgaccactcggacag

SEQ ID NO: 14734 - DNA, 487 bp, Zea mays
  unsure (1)..(487): unsure at all n locations; Clone ID: LIB3159-011-Q1-K1-G9
atcgagtctttctccgacgtctacttccagcgcctatcttctccaccgcgttggctgctcctgcggcgccagtctgctcgccgggatgcccctgccctactcctcggtctccctcttctgccacggccgctgctcatcgcgcccagctgaagctcgccggacttccctgtttctctctctccgctgctcgctcggtgtccggtcgtggtactgcctgcgcaccacgagtttctccctgacgcccagcgacagccgcagctcggatatcccaggccgcgtgctcgccagtctcgagcgcccctcccttgctcctctagctcgtggagcttctcctcgacagcgcccctgtttctttttggccggagcgccctctgctcggcgtccctcgctgctcgccggggaaactctntccctgctcgccggcagcaacatccagccgcgcagctcttgactcgccggccgagccccagccccagcgtcgtggagc

SEQ ID NO: 14735 - DNA, 122 bp, Zea mays
  Clone ID: LIB3159-011-Q1-K1-H1
gggtcttgttgctattggcactccagctcatgtgttaagttctttttgtagaaatggtacgttgacaaattgttttataggagtgacttttcattattatagtaaagaatgcgtgtgatctc

SEQ ID NO: 14736 - DNA, 391 bp, Zea mays
  unsure (1)..(391): unsure at all n locations; Clone ID: LIB3159-012-Q1-K1-B5
cttgcaaagggaagtgggtgtggggctgctgctcctcgctccttcgacgcgtgcagggcggggttgctgcaaatgcttactaaatgaagtgtattttattctgtcttcttcttttttctttcttcctctttttttttcttggtcgtccttcctcctttgccgggatatttagtaagtgtagtaatgaagcactaatactaatggatgaatctcgtgtgcaagatgttgatgagcaatgctacagattaccggagagacttcattgagctttcagattcttcaaaaaaaatgtttttggggaatatgcaactgatgaggtgatattttttttaagaaaattaaccaatnnnnaaaaaaaaaaaaaaaaaaaaatataaaaaaaaataaaagg

SEQ ID NO: 14737 - DNA, 173 bp, Zea mays
  Clone ID: LIB3159-012-Q1-K1-B7
cggacgcgtgggcaccatgacagcttgttttgcttctatgtttttgcttgagctaaaaaaaggaaaaaaaaaaaaaaaaaaagaaaaaaaaaaaaaagggcggccaatctaaaaagaaccaaagctaaaatacacaaacatgcaacgacatagggcgtccatattagagaacc

SEQ ID NO: 14738 - DNA, 458 bp, Zea mays
  Clone ID: LIB3159-012-Q1-K1-B9
cagcatttcttgagaaattcattgctggaccttttcaggaccgggggactaataattggtcgggctttgagtcacaccatcaatttcagtttcagtgaagccttattcaatttcacccaggaaatctgctatgttgatgaagtcttctggttgtaaagagaaaacagtgaactctgggtttcccaacctgtctttaaaggcttgccacaggagggattctttgtctctgtgatatgtagttgtctatttctcgatcctgtatcttcgatatcgagcgggcattgtcaccgatgagatgctgtctctaccacagaaaccttttctagctgtaggactcttagaggcctttggagcagcagcagggatggcagctggagctgttctttctggagcttcaataccaatactgtcacagacctatcttgtctggcagcttcttctatctgctatattcttga

SEQ ID NO: 14739 - DNA, 446 bp, Zea mays
  Clone ID: LIB3159-012-Q1-K1-D3
ggcatacggtggtggtgcttatggaggtggttcctatggaggtggtgcatatggaggcagggcctatggtggggccccatgtggtggttatggcactggtggatacggcagttatggtggagcaggtggtactggtggtgggagtacaggtgctcggggttcaagtaggtaccatccatatggaaaataagctacaagttcaatcaagttttctcggtgtcgggagtttctctggtcctcctagttcagttttcatgccatgtccacctaaacaggggcattggagcataattgggttgaacacgttaccaccggaacaattgtgtaactgcagctgttgagcctgcccgcctgccttcgcttgctgtacaagctacacatgaaacctgtgttgtattctttagttcggtatgcagagtttaaaaccctgagaaacaagcatttta

SEQ ID NO: 14740 - DNA, 146 bp, Zea mays
  unsure (1)..(146): unsure at all n locations; Clone ID: LIB3159-012-Q1-K1-E7
gcgtacgtancagcatacctacggatttaattgttgtttttatttgaaaggccaaatggttgttctggggtaaagtaaggggagggattcctccccctacgcctgcttaaaatacttatatgaacatatcagtctttcttgttttt

SEQ ID NO: 14741 - DNA, 453 bp, Zea mays
  Clone ID: LIB3159-012-Q1-K1-F1
ggcgggtatattttttgctagtaaacagctatatagctccgtttgagaagaaatacttcgaggagctgaaagtgaaagcagaggaagagaaaaaggattcccagaaggaagcatcccaagcatctacaactgcagaaccgaaagacacaaaagtgccaagcaagacctcttcgacaaatccagaacatgacctggatgtatttctgctgggggatctgggtagcgatgatgaggcttctgttggtggtgatgatgggctagatgatgactttgataagattgatgcgacctcgggattggaaagtgatgacgatgacaaaaaggcagcaacagggaaggcagaaggtgtgtagtagtagactatggttttgagagatgacgccaatgatagcgaacttcaggattccatgatgatattgtatattagttgatcgcatgccgtatgttcatttg

SEQ ID NO: 14742 - DNA, 286 bp, Zea mays
  Clone ID: LIB3159-012-Q1-K1-G8
tcctgtcaactgttagatgtactgccggaactcttgtttgatgagaattggaacaaggaagggccaagcgcggcaaagggcgcggtcactgtggcagagggcatgggcgtggcaaccatcaatataacaatcaccattacaataaccagcaccaccagaacaaccaagccgcagtacaataaccatggcaacaaccaccttggggggaaccggggcagccttactctgtggaactacaccgcataacctgataaccaagcttgagccgcatccgcagctgcctatt

SEQ ID NO: 14743 - DNA, 397 bp, Zea mays
  Clone ID: LIB3159-012-Q1-K1-H3
gaccacgcgtccgcaaggcgcatggtctttttcgggacttcagttcccaccatattcaaaggtctaagaacaggagaaatacaacagtgcttctggaggggatttgtctgtgtgcgaggattcgacatggagactagagcaccaaggcctctgtgcccccatttgcacattatagcaaggccgaaggcccgcaagacagcagcaactgagcaagtactctaatcagcaaagatatcagttttatgaacatcatgtttattgtgatatgacatcaatagctctcgacctgtgcatggaatcatattacttcctgcctggcgatggccattgtttagggaatttaagccatggatggggtccgagactattagtcctctcgtcttgttctagatcgcga

SEQ ID NO: 14744 - DNA, 431 bp, Zea mays
  unsure (1)..(431): unsure at all n locations; Clone ID: LIB3159-013-Q1-K1-B10
gccgcgcctcatggcgcattatctcctccatttatcanaangaggagggccgaggcaatgagtaccgattaacactgatcaaggattatcgtggcaagattgagactgagctgaccaagatctgtgatggcatactcaagctgcttgagacccatcttgtgccgtctttcactgcccccgagtccaaggtcttctatctcaagatgaagggtgattactacagataccttgctgagttcaagactggagctgagagaaaggacaccgcttagaacacgatggttgcatacaaggctgcccaagacattgctctggctgagcttgctccaactcaccctattatgcttggactggcacttaacttctcagagttctactatgagattctgaactcacctgatcgcgcctgcagtcttgcaaagcatgctttt

SEQ ID NO: 14745 - DNA, 198 bp, Zea mays
  Clone ID: LIB3159-013-Q1-K1-C2
gaaaagtctgttcaccttttgcacttagatttattgaccgcgccatgcaatttgggtatcgtaactttagaacaggtgccgatacataacatcaatcatctcccctctgtatcttttctccaaaggctcttctactacatatggcatccatgatatcctccattattcttcaaaggcactctctagagcaccatgctt

SEQ ID NO: 14746 - DNA, 365 bp, Zea mays
  Clone ID: LIB3159-013-Q1-K1-D3
gtcggatagcttcagccacgacgatgacgactctaggccgagagacaaggttcagagacgggtcgcgcagaacagagaggcagctcggaagagccggctacggaagaaggcgtacatacggaacctcgagacgagccgcgtgaagctggcgcagctggagcaggagctcataatggccaggcgccagcaggtacgcacggcgcgtacggcgtgggaggaggagtcgcaccgccggcggcgcccgtggacccgcgcgtcgctgcgttcgagctggagtacgcgcactgggtggaggagcagagcaggcaggcgacggagctgcgggcggcgctgcagtcgcacgcgccggacgtccagctgcgggt

SEQ ID NO: 14747 - DNA, 406 bp, Zea mays
  unsure (1)..(406): unsure at all n locations; Clone ID: LIB3159-013-Q1-K1-D6
gccggcagatcccaagctcaccggagaggggtaagagggcgaccgaaggcggcgatggggggcatcgtggacttcgcggagagtatgatcctccgtctgatggaggacccggacaagcgcgaccaggttcggcgggagcatgtctacaagatgaaggagcggtgcgagcgcactaaggcggcgtggagcctccctctgcgcccctacggcttctggaccttcgaccgcttcaactcgcagctctcctgggatccccagatcagccaggccgccggccgtcgggacccctacgatgacctcatcgnccgccactctggctcgccgccgtcttcctgaacacccgttccgatctttgcccagaaggtctacttgggcatcaataagaaactctttcccctcaaactga

SEQ ID NO: 14748 - DNA, 431 bp, Zea mays
  unsure (1)..(431): unsure at all n locations; Clone ID: LIB3159-013-Q1-K1-D7
ggcggaccgaccactccctccacaaccgccttcagcactctacggtcgagggtcctcgagtnnccaagatcagtggctcgagtcgggagacagcaggagggtcccgcggctttcggctttcgtcaaccttctccacgtgaggagggcgatgacggaaccgccatcgagggcantgaacggcaagagagcctggactggccgcaacaaatcaccgtcaaccgagggcccagtctccgcgtgcggcacgtggagggcggcggctggtcgggtaccggtggtgagccgtggagggcggcggctacgtgcggtgtgcgggcgccgtgatggcaggtggcggctacgggcggtgtgcggcggctaccggtggacggcgggagcttaccgtggtggtggcggctgtacttgcggtggcataccgtggcggcgggcta

SEQ ID NO: 14749 - DNA, 452 bp, Zea mays
  Clone ID: LIB3159-013-Q1-K1-E10
tgcctgtcgtactcgccaaccgaccggccattcagcgacgagctcgtcgccatgctaacgcggctccacagcttataattaatcaccatatatcgcaaatttcttgagcgcggcgcccgatcatgttggatcagtgcttcctgtttcacagctagcacgggtgagtgcagcagatctcgttgtgtggtgcttgtgagtcacaagcgccgaaatggtcgacgagggagctggcagttcaaggccatataggacaggcgcaggcgcaggcgctgtgtcccctgtacgattcatctgtgatgtagtagctactaggtacaatacaagatggtggttgagcttcctgggttgttttgcgcgtgggttgtgaatatgtcttggtagaaaaaaaaactctgtgccgtggatctgatctgttggtgttagctgtagcctgtgtatagcctgtagaaaga

SEQ ID NO: 14750 - DNA, 382 bp, Zea mays
  unsure (1)..(382): unsure at all n locations; Clone ID: LIB3159-013-Q1-K1-E4
acgctgcggtttgattctgattttattgtagtcctgcacaacatcatatgcggcgtggtgcatgagaggtgaggatttcacattgagctgctaatancaattctttccaccatttatgtagcgatttttttttcttgttctgtccggtgttttgaaggatggatggatgttcagcttgatacctcaacggtgacacttgtgtgtgctgccgctgcctctaggtatattttggtacatatatgtggtgatacattgctcaggtcatcttttctactgccaaaccctggcccggagggcaaaaatattcactgcanactgttgtaactgatgttaggcatacacanaatcatctcaaacatanaaaaaaaaaaaaaagggcggc

SEQ ID NO: 14751 - DNA, 256 bp, Zea mays
  unsure (1)..(256): unsure at all n locations; Clone ID: LIB3159-013-Q1-K1-H3
acggttggttggaatctcttctggtgcatctgcttctgcggcagttaggcttgctaagaggccggaaaaccccgaaaggctatttggtttcnttttcccaacctccggcaacccctacctttaatcggggctgttccagtccatcaaaaaggaaccggaaagcttgttgttcaacccttaaaccacaaaattctggctctttgccaaactatttcctgaaacgttcaccatttccataacaaaaaaataaacctcg

SEQ ID NO: 14752 - DNA, 215 bp, Zea mays
  Clone ID: LIB3159-013-Q1-K1-H4
aacctatgtagaggcctttcgattgttgattctcatattggttggaagctcgtgtttgacgttgacacggttgtgcatataagtcctcttaatttagaagcatattttgatcgaattattgatttgtctgtttaaaaaaaaaaaaaaaaaaaaaaaaaaaaaaaaaaaaaaaaaaaaaaaaaaaaaaaaaaaaagggcggactatttaaaagatc

SEQ ID NO: 14753 - DNA, 192 bp, Zea mays
  Clone ID: LIB3159-015-Q1-K1-A2
cttccttcctctcctctctgcaacgcgtcgggaagcagctgccagccatggcaatggcggcggggtcgagcgggctgaggagctgcagcgcattgggcgtgcccagcctgctggcgccgttgacgtcatcttcgtcccggtccggccgcctgccgttctgcgcccacgccaccaccttcgggcgtgttacca

SEQ ID NO: 14754 - DNA, 427 bp, Zea mays
  Clone ID: LIB3159-015-Q1-K1-A4
tatggctcctcatctcattctcaagtgtgtagccgagagagcgccatggccagcctccagggcactcctacttcggcgttcactcagtggaatgagctgaagttcgaaggcctgtacttgttccacaagtaccagggctcaggcgccaaccaaactcaggtcataagcaacaaggcgccgattggcatcggtgccaccgtagttaacaactggacagtgtgtgacgggccagggccgaacgcaaagctcgttgcccgtgcacagggcttgcatatccaagccggcaactgggtcaactccttcagcccagtgttcgtggatcaaaggttcagtgggtccacgcttgaagtgaccgggatagtagttgaatccggggagtgggctatggttgggggcaccggtcagtttgccatggcaaacggtgtca

SEQ ID NO: 14755 - DNA, 274 bp, Zea mays
  Clone ID: LIB3159-015-Q1-K1-A7
tcggaccaaccccagagagctgcagctctgtaggaagtgacaatctgtttttgttagatagtggtgctcaatacattgatggaactactgacataaccagaacagtgcattttggtgaggcttccccaaggcaaaaggaatgcttcaccagagttttgcagggccatatagctctcgatcaagcagtgttccctgagagaactccaggctttgtgctagatgttctggcacggtcatctctgtggaagattggactggattatagacatggcac

SEQ ID NO: 14756 - DNA, 341 bp, Zea mays
  Clone ID: LIB3159-015-Q1-K1-B2
atcggctccggcttcctgcggttcacggccaccattgtccacgtcctgctcttccatgggagggacatgtggaagcagagcaagtcggccatgaacgcggtgaagctggacgtgcacgccaagctgatgcagaggtacaggcaggtgccgcagtggtggttcctcatgctgctgctgggcagcgtggtggtgtccctgctcatgtccttcgtctggaaggaggagatgcagctgccgtggtgggggatgctcttcgccttcgcgctcgccttcgtcgtcaccctccccatcggcgtcattcaggccaccactaaccaggcacgcggcgctcccgttctact

SEQ ID NO: 14757 - DNA, 347 bp, Zea mays
  Clone ID: LIB3159-015-Q1-K1-B4
ccattatgaacctagccctctctgggtggtgttgctgttctgtgtttgtcaagacgagctgtaattttgctctatgtggatgaccgtttaccgttactcgaacctatatgatgttccatggataatgttttttggctgaggaattggctcgtcatatttatgtatgcattttcactctctctataaagtgtactagagtaatcttccctagcgaaagggcctatagcctagtggttaaggactttcgaatagcatctccaaatcttgggttagatttctctcgggaacaaatttttaggcttgttaaaaaaatcctctcgctatgtctcatccgcttttgggttatg

SEQ ID NO: 14758 - DNA, 355 bp, Zea mays
  Clone ID: LIB3159-015-Q1-K1-C1
ggcggctggtgcaacccgccgcggcagcacttcgacatggccgagccggcctggctcaagaggggcatctaccgcggcggcatcgtgcccgtcaactaccaaagggtgccgtgtgtgaagaaaggcggggtgaggttcagcatcaacgggcgcgactacttcgagctggtgctcatctccaacgtgggcggctgcgggtccatccagtcggcgtccatcaaggggtcgcgcaccgggtggatggccatgtcccggaactggggcgtcaactggcagtccaacgcgtacctcaatggccagagcctgtctgtccaggttaccagcatcgacggccagaccaaaacctttcccgact

SEQ ID NO: 14759 - DNA, 158 bp, Zea mays
  Clone ID: LIB3159-015-Q1-K1-C11
tagatccttattatctttaatgacaacttttacttcatgccctatattatcatcatcggggcgtttctataaaagggcgggggcacttccattataaccttctattacattcattatttcctttactactccaactttacctgttatgtgattaatcc

SEQ ID NO: 14760 - DNA, 358 bp, Zea mays
  Clone ID: LIB3159-015-Q1-K1-C3
ggccgccctttttttttccttattggccttcaggctatgttgagttatagctagttctggggatctgttcataatataaatttatataatgaaaagaaagcaaatcgattgatcaaaaaaaaaaaaaaaaaaaaaaaaaaaaaaaaaaaaaaatttaaaaaaaaaaaaaaaaaataaaaaaaaaaaaaaaaaaaaaaaaaaaataaaaaaataaaaaaattaaaaaaaaaataaataaaaaaaaaaataataaaaatataaataaagggggcgccctctaaaaagattcaatataatcttccctttctttaaaattttaaatttttttataggggtaccaaaattaaaaaacttggcc

SEQ ID NO: 14761 - DNA, 464 bp, Zea mays
  Clone ID: LIB3159-015-Q1-K1-C6
agccttcgggccaggttcggccggccgcggccaatctgggagcgcgcccgcggcaaggtggaaaagggggagcgcgtcaaggccatggccgcgcgccggatcgccgctggcgcctccgccgccgcgctcgagatcacctgccacgcctgcatgcagcgcttccacccttagtaataatatataatactatatataatcagcatcagcacgccatgcatgcatgttattggcttaattattttgttatatatagctaccgtgactatatagtactcctgtactactagctagtattaattacattcgttagctgtgttaagaactttgtttatgagttaatgcaggcttgcgatcgcatcaccataggtaaagggaaaagacagatcgatgttcttctcttgctttcttgcagaatacacaccgcatcgtttgagccagcctaaaaagagaaggaaagggaatct

SEQ ID NO: 14762 - DNA, 333 bp, Zea mays
  Clone ID: LIB3159-015-Q1-K1-D5
agccttccgaacaaacagacggaccttcggccttaggccccaacgcggggggtaccgaacccgtacggggaagctcgtaggcgacatgaatccgcccgcacaacacgcgtacaccggcgcaggatgccacaccgcggcgcctgcggcagccccggagtacgcgcactacccgaggctctcgtcagaggaggtggtcaacgaccgtcgaccgcgcgttatgacgccgtcaccgacgggccgtacgcctacggaggcaacctctacatctactaccccgtctgcggcgccgacatctacgcgaagaatacgatggactacgtgaaggacgtgctc

SEQ ID NO: 14763 - DNA, 71 bp, Zea mays
  Clone ID: LIB3159-015-Q1-K1-E1
ccagcttacaagttaaaaaaccatcaaaagtttcagcagctgcgaggatgaagtaaatgggtttgttctac

SEQ ID NO: 14764 - DNA, 321 bp, Zea mays
  Clone ID: LIB3159-015-Q1-K1-E11
gtggaggagcagccattgcttcatcggtggccgccgcggcgagcacattcctgggcacgcgcctggcggacccggcgccacagaacgggcgcatcgtggcccggttcgggttcgggttgggcggcaaggcgaagcctgctccgaagaaggtggcgaagacatctacctcctctgaccggccgctgtggttccccggcgccgtggcgcccgactacctggacggctcgctggtcggcgactactggttcgacccgttcggtctcgggaagcccgtggagtacctgcagttcgagttggactcgctggaccagaacctggcca

SEQ ID NO: 14765 - DNA, 390 bp, Zea mays
  Clone ID: LIB3159-015-Q1-K1-F3
gtcggttgtcctggtggcgagggtgaggacgaacatgatgttgtatggttctggttgaagaaagacgagccgcatgagtgtccagtctgctcgcaatactttgtgcttaaggtaattggtgatggtggagatccagatggccatgacgatgaagatgatggacatcactaaggatgccttgtggttctgaaaataagaatctgatgaggcagatgagtccatcacacttcttttttcttgaaccagactgcacggcatccttgtttatgaacagacatttggccatcaagcgggtggtagttaatcacctagggattttgtccagacaaaagcttattgagatttgacccatgcatttctttaagagcatcatcgaataaaaagatgact

SEQ ID NO: 14766 - DNA, 447 bp, Zea mays
  Clone ID: LIB3159-015-Q1-K1-F4
gaggtcccctgttattgctcagggtgtgcatggccacttcaccaagcgccccgaggagattggagctggtgaccagggacacatgttcgggtatgcgaccgatgagacccctgagttgatgcccctcagccatgtccttgccaccaagctaggtgctcgtctcaccgaggtccgcaagaacggaacctgcccctggctcaggcctgatgggaagacccaggtgacagtcgagtaccgcaatgagggtggtgccatggtccccatccgtgtccacaccgtcctcatctccacccagcacgacgagacagtgaccaatgatgagatcgctgctgacctgaaggagcatgtcatcaagcctgtcatccctgagcagtaccttgacgagaagaccatcttccaccttaacccatctggccgctttgtcattggtggacctcacggcgatgc

SEQ ID NO: 14767 - DNA, 438 bp, Zea mays
  Clone ID: LIB3159-015-Q1-K1-F5
agccttcgggcttaccttggccccggcccgcggtttccccttgggccgccgggcgcccgcacccgcgggggcgatgatgaactgcgccggaggcggagaccccgtggaggacttcctgatctccggcgccgtcgacgacgaagatctagccatcttctgcgacggaggacttgggattgagggtgtcaatggagatgcttgtggatttgagcagtctaatttgggcaaaaggggtagagatgaaccatgttcatctggtctaaaatccaaagcttgtcgtgaaaaaatgaggagggacaagctgaatgacaggttcctggaattaagtgcggttatgaatcctggtaaacaagcaaagttggataaagccaatatcttgagcgacgcagcccgtatggtggcacaacttagaggtgaggcagaaaagcttaaagaatc

SEQ ID NO: 14768 - DNA, 438 bp, Zea mays
  Clone ID: LIB3159-015-Q1-K1-F6
cggacgcgtgggcaaattctttgagaaagaggtccctgttgatgctgtcttccagaaggatgagatgattgacatcattggtgtgaccaaggggaaaggttatgagggtgtggtcactcgttggggtgtcacccggcttccccgcaagacccacaggggtctccgcaaagttgcttgtatcggtgcatggcatccggctagggtctcctatacggttgcccgtgctggtcaaaatgggtaccaccaccgcactgagatgaacaagaaggtttacaagatcggcaaggctggacaagagacccacgatgcctccacagagtttgacaggactgagaaggacatcactcccatgggtggcttcccccattatggtatcgtgaagggtgactacctgatgatcaagggctgctgtgtgggtccaaagaagagggtggtgac

SEQ ID NO: 14769 - DNA, 393 bp, Zea mays
  Clone ID: LIB3159-015-Q1-K1-G10
cggacgcgtgggcgagcagcgcgcccctgtcatcatgtccatctgatgcagcttctgctgctgcttctgccgccattgaagacagcgtgaagcatttcctccaggcgccacttgaaaacagtgggatcatcccaaacgcagcagtttttcagaccaagccagcttctctgcaccgtgttgctagcctggagaacctgcagaagaggatcgtcggggatgcaatgtattccgagaccgcgtcaacgacattctcagatcctgaagctcttgccgataggtaaaggttgctcctgtcctgtgatgaacagccgtgtgatgctctagcggcctaagtgcttctggtaatggaagttgtagcacccatgcgcctgggtggggtctacacagtgattt

SEQ ID NO: 14770 - DNA, 104 bp, Zea mays
  Clone ID: LIB3159-015-Q1-K1-H7
cccggattcccgatgcttggtctgtgatgtaataaatcctggaattcaacagttgttgaggaggggataaattaaaaaaagtataacataactaaaaatttctg

SEQ ID NO: 14771 - DNA, 408 bp, Zea mays
  unsure (1)..(408): unsure at all n locations; Clone ID: LIB3159-016-Q1-K1-D3
ggcattttgaagcgcgtggattccaaggagtatgtcgatggatgggagctttgctgaagatgttcaggaatagcggcgttgccagaggatgctgaagcataaactaacaataattgtgtataaacgcatactagcacggtgctaatctaatcgttttcacatgaatcgggaagtctcgctggctcaccacagttgtacgtgagatgagtccaactggcaactgcagcttgatgtggtatatataaaagtgaaggtttcagctccnaaaaagaaaaaaaagatcaaaaaaaaaaaaaaaaggaaagggcggccgccctttttttttttttttttttttaaaaggataataaaggggaagaaattcaccatactttttatgggttccggggtaaccgtttaaaaatacaa

SEQ ID NO: 14772 - DNA, 80 bp, Zea mays
  Clone ID: LIB3159-016-Q1-K1-D5
acgaaaaaaacttccatttttttccgaagagattataaacacgggaagcccgaaaaagaagggcgcatgaaaaagggcga

SEQ ID NO: 14773 - DNA, 262 bp, Zea mays
  Clone ID: LIB3159-016-Q1-K1-E10
ccttggatttagagtgtataataattgtataatcaacattgtataaattctcacagacgaagcgggaaccacacacgtgaaattttccgatgggagttgtgggttcttgtagaattttagttggcacaatttttttaacaacataaatttattattcatgggagcggataattataccatatctatgtccaatggataatttgttatccacatgtatgagtatgaacataataaggtattcattgataaatttttttttctg

SEQ ID NO: 14774 - DNA, 208 bp, Zea mays
  Clone ID: LIB3159-016-Q1-K1-E8
acggaagacaatgatagacttcggagccgtattatcactccggcccggcgcagagtgtacagtgcgacatgatgcactgcatgggggtgcgggacctgatgcctaacacatatttgtgctagagctgggacctcatgaaaactaactgctgacttgcctcccaacggaacactttgaagtgcatcatccggagcctaacctatcctat

SEQ ID NO: 14775 - DNA, 442 bp, Zea mays
  unsure (1)..(442): unsure at all n locations; Clone ID: LIB3159-016-Q1-K1-F12
ctangctaactcgaaaaaaacaaatgttgttcataaacaaaaggggttcacagatatttctccatacgttcatgctcattgtggtagacgcagctgaccacctagagctgcatacttacttattcagactgatccagcatgttgcaacatcggaagttcacatgcttacagacgacaaattttcataacaatagcctggcttggctgcttcacagaataaccaaactacaaccacgaaattgcgacgatataaaataaacaactcagaagcaaatcgaccccagaagcccgtcttactcatcaagcactcccgccttctcctccatggcatccgcttccttctcccagcatagaagattaaccagcttgtattccttcttcataggaggaggagcactctccacgttctcgccgtcaaagcaatggaaaacatatttgggcg

SEQ ID NO: 14776 - DNA, 404 bp, Zea mays
  unsure (1)..(404): unsure at all n locations; Clone ID: LIB3159-016-Q1-K1-F8
nncgcaagcagcgcagcgcgcgtcggcatggctcgcctgttctcggcgttaagccgccgcaggccgagcgacacgcgacaagggcgtacgatcaacaactcgggccatacgcacactgagcgacctcgctccacacgcaccatgcttgatacactgttcgcgagggtcctacttaagccacgccatttgctcgcgtcccgcttcatcgaaccgaggcggaaccgtgttctctggattaatcacactacgactctctatgagcactgtggacacgatcaaccatgtagtgcgcggtctccttctgcgatgagtgggagagagaggatggcaacatcaatcctttgttaatggcgatctccttaatcaagagagctaccgctcgcacttgcaggtctgtaatatat

SEQ ID NO: 14777 - DNA, 346 bp, Zea mays
  Clone ID: LIB3159-017-Q1-K1-B12
tcgatcaaatcctgattaaatgcagtctattctctcttctgaaggagattcatgtcctgtaaggtcatgtacagattgagctgttcttgatcaacttgttggtttcctggaatctcgataggctggatatccaacatctttggatgttgattaatctatagttgctgatagctttttttaaccaaagaaggaatgtgcttctatgcttgtttagtttgttaataagatgcttcattcctgtcttcatgccacaaatgtgtttataaactactttgtcaacctcacattgtctccctgtcctgtttcatattcccctgaattgaaatgagattgcatgttttttttt

SEQ ID NO: 14778 - DNA, 343 bp, Zea mays
  Clone ID: LIB3159-017-Q1-K1-C12
acgagccgcattcgcagccatggacgtgagcgagagcaagctgtaaggcgaataaaggcgcggtggggcgcatggtctgcggagcgacctataaaatcgtgtctcgttcctgcagggccgtgcttcaggtcactatgagccgcgtgtgtcggttcctcaataaaggccggtacgcgcaccctcgttatcacggatgcccccctctacttcgacgccgggctggagtacctcccgtgcgacgtgctcgagctctcctgctacccggcatgggacaactagaagacacgcttcataatgcgccacgtgctgctcgccatacagaacgacgaggagctcggcaagc

SEQ ID NO: 14779 - DNA, 426 bp, Zea mays
  Clone ID: LIB3159-017-Q1-K1-D12
ctccggcttcctcctctacaaggagctcggtcgcttgctcaagaaaactaacccggtcgtggcggagatcttctcgctcatgtccagggacgaggcgcgccatgctgggttcttgaacaagggtctgtctgacttcaacttggcgctggacctggggttcttgaccaaggctaggaagtacaccttcttcaagcccaagttcatcttctatgccacctacctgtccgagaagattgggtactggaggtacatcaccatcttcaggcacctcaaggcgaacccagagtaccaggtgtaccccatcttcaagtacttcgagaactggtgccaggacgagaacaggcacggtgacttcttctctgccctgctcaaagctcatccgcagttcctcaatgactggttagccaagctctggtcacggttctt

SEQ ID NO: 14780 - DNA, 262 bp, Zea mays
  Clone ID: LIB3159-017-Q1-K1-D4
agagcatccatcggtcggccggtggctggccgggagtaataatgacgaaccaataatctagttttgggtttagtgtgctcagcagagcagttcgtgttcatgagttcgtcgtcgttgtattttctattgtcagcggtggcagcgccgtacgtgttgcctcgtacaccacaaccgaataaatggttatgaatttcttctaaaagaacaaaggcatatgttatgacaagtactcaaatttagagtcttttaaaattaaaatatg

SEQ ID NO: 14781 - DNA, 212 bp, Zea mays
  Clone ID: LIB3159-017-Q1-K1-F8
gcgtccttcttctggtgcttctcacaggttatgctcccacgcactcctttctcaactaagagggggttgatctgccgctctgtgtgcaatctctctttcttaaggagtggaccacctcgctctcttaccaatagctcctcattttccaaaaactggtagaagagatagagcctctccttcaactatcaatcgactgttctcttcagcacccc

SEQ ID NO: 14782 - DNA, 414 bp, Zea mays
  unsure (1)..(414): unsure at all n locations; Clone ID: LIB3159-017-Q1-K1-G10
tcgattaggccagggaccacagcatctggattggcgaaactgaaaccagtttttaaaaaggatgggaggacaactgctggctattccagtcaagtgagtgatggtgctggagctgttcttctcatgaaaagatctgtggctctgaagaaagggctgcccattcttggtgttttcaggagctttgcggctgttggagtggatccagctgttatgggcgttggtcctgccgtggccattcctgctgctgtgaagtctgcatgccttgagattggagacattgatttgtttgaactgaatgaggccttcgcctctcagtttgtctattgctgcaacaaagtggggctggaccgttccaatgntaatgttaatggaggcgcgattgcccttggacaccctctgggagcaacatgtgcc

SEQ ID NO: 14783 - DNA, 162 bp, Zea mays
  Clone ID: LIB3159-017-Q1-K1-G12
tcgctcccgcattgaccacaagttcgacctcatgttctccaagcgcgccttcatacactggtacttcggggagggtttggtagaaggcctgttctcctaagctcactatgatctagtcagagcttgagaaagactactatgtggtctgcgctaattttgact

SEQ ID NO: 14784 - DNA, 214 bp, Zea mays
  Clone ID: LIB3159-017-Q1-K1-H4
gcgcgcgtagccatcatctccggggatctgatgaatgtctagttaccaaacaaataggctgtattagcgtcgttgttctgtattcgttattttggattcggttgcagtgaaaaacagctttactaatcttaaaaaaaaaaaaaaaaaaaaaaaaaaaaaaaaaaaaaaaaaaaaaaaaaaaaaaaaaaaaaaaaaaaaaaaaaaaaaaataatg

SEQ ID NO: 14785 - DNA, 142 bp, Zea mays
  Clone ID: LIB3159-018-Q1-K1-C11
tcgcaataccccctcggtagacgcgtttctaatggctgtgttcctctcctggcagggtggcgcgcgcctcaccctcacccaggttccactcctacttctcctatgacctatatcatctgttctggtctgcgcctcgtggccg

SEQ ID NO: 14786 - DNA, 306 bp, Zea mays
  Clone ID: LIB3159-018-Q1-K1-C12
acgcgccgcagtatcatccatggacgtgagcggagcaagcggtttagcgtataatggcgcggcggggcgcttggcctgctggccgaccaataaatctgtgtcgcggtcctccaaggccgggctgtatttccccgtcagccgcgtctggcggtacctcaaaaagggccggttcgcgcagcgtgtttgcacgggtgcccccgtctacctcgccgccgtcctggagtacctcgcggccgaagtgctcgatctcgtctgctacgcggctaggtgacaacatgaagacgcgcatcattccgcgccacgtgc

SEQ ID NO: 14787 - DNA, 196 bp, Zea mays
  Clone ID: LIB3159-018-Q1-K1-C4
gtgtgtgtctctgcatggacattttcctactctgcgttttttctctctctactgatatagtatatatgtggtgtgtctatatatgtgtgcacgtggttttcgctcggctttttatcaacgctttgagaataaaagctttctcttcatctgtatattttatttttaatgaaagaaataaaccactatatatttcgac

SEQ ID NO: 14788 - DNA, 289 bp, Zea mays
  Clone ID: LIB3159-018-Q1-K1-C7
tcggcattgactgcgctaaacaatgtgggcacaatgttttggattattccggacagagcacatgtggggtgcttttttctagaagattaaagctgtcatgcttatgattatggctcccacgcttgatctgaagcagcaggcgctctaccgtctcttgccgtatcagaggtctgacttctaatgcattttccgtgctatggatggactcccggtgaccattctacttctgtacccttcccttcacgagtttctttcataatggaacatcgatgacattgttagtgaattt

SEQ ID NO: 14789 - DNA, 79 bp, Zea mays
  Clone ID: LIB3159-018-Q1-K1-D3
aaaaaaaaaaaaaaaaaaaattttaaaaaaaaaattttaaaaaaaaaaaaaaaaaaaaaaaaaaaagggggaatttttg

SEQ ID NO: 14790 - DNA, 237 bp, Zea mays
  Clone ID: LIB3159-018-Q1-K1-D5
gccagtttgcgttcgccactttttcaaaacctctctaccaaagcccgcaccggcagcccccagcgcagcatttttcaatggctgcgccgcctgtccaacctgtgccaaccgctgctgcagcagcagcggctgtgaaccgggacgcgttccatctgtgcttcgtctgctcggacaacctggccgagatcatcgcccgctgtctggcagctgttagtcgttcttcctggcctccaccat

SEQ ID NO: 14791 - DNA, 323 bp, Zea mays
  Clone ID: LIB3159-018-Q1-K1-F7
gcaaacccccgtcatggcctcctccaagatactgcgcgccgtcgtcgtcgtcgtggccgtcggaagagcctccttcgccggcgccgtcctctcctcctaggcccccgcgccgagcccggcctccggcgccgcggccgtctcctcgtcgctcttggccgccgccctctgcccggacgtcgcgctcctcctcggcaacctgcgccactgatgacgcctgtctgcctgtccgacgagagccgacgagtgctgtcgcgtgaagttattgtcctctgtatgcgtgtgtgtgtgttcctgaccttgtgcgtgccttgtaccggcacccc

SEQ ID NO: 14792 - DNA, 355 bp, Zea mays
  Clone ID: LIB3159-018-Q1-K1-H11
ctcgtcgtcgcccggaggacgtagcccaagcgcacccgcggaagatgtcgctgtcgaagacggtctcggcacgccgcctcgtgccggcgctctttccgctcgcgcacgcggacgccgcctcggccacggcttcccagccgcgagcgccataaggacacgtttcgcgcgacgcccccgatccccgcgcctttcccacgggcagtgcgcctcgcggagccgatccccacgctggcgccgtcacgcctggcggtccacaaccggatcctcgcgctcctctcggggccccaggccgacctccccgaggcggtgcttctcacccgacacgcgctccactccaactggcgccccttattct

SEQ ID NO: 14793 - DNA, 390 bp, Zea mays
  Clone ID: LIB3159-019-Q1-K1-B11
ggctgatgaacgcaatggcgggttctgagactgttgcaaactgtgcacccaccgtggtgaggtatacttgtttggcgaagtgcctctgcaggacggggacgacagtccaggctctcactgtgctggataggacgacagacagacggctgatgccaaaccgtgcttttatgcgcacgctgcttgaagggatctaccctgagcatacggatatcaactcgtatgatgtggcgaagctttgtattgctgatcggagtgtttcgagtacacagtgctacacatgttctactcgtttacttgtggaaggtcgccatgacgagaacaagctgcatgactggcacggatgatgatgacgaacggtgtgcaactgaccccactcgattgcagttgtat

SEQ ID NO: 14794 - DNA, 426 bp, Zea mays
  Clone ID: LIB3159-019-Q1-K1-C3
cggttccggaaacccggcggcgacccacgcgtccggaaattttgaaggtcgtgtgcatcctttaaccagagcaaattaccttgcttccccggcggtagttgtggcttatgcattggctggcacagttaatattgattttgagaaagaacctattggcatctcgaaagatggaaaagaggtttacttccgggatgtttggccatccacagaagagatagccgaggttgtcaagtcaagtgtgctccctgacatgttcaagagcacatatgagtcaatcaccaaaggaaatcctatgtggaatgagctgccagtctcaacaagcactctctacccctgggatccatcatctacatacatccatgagccaccttacttcaaggatatgaaaatgagtcctcctggcccgcggcctgtgaaggatgcata

SEQ ID NO: 14795 - DNA, 373 bp, Zea mays
  Clone ID: LIB3159-019-Q1-K1-C6
aaacccgcggcgacccacgcgtccgacttgatcttctattcaacaagctaattaaggccggtcatccctcttctagcggcgggcattatccaaggcggaggagaagcaccaccaccaccacctgttccaccacaagaaggacgaggagcagctcgccgccggcgggtacggcgagtccgccgagtacacggaggccacggtgacggacgtggtgtccacgggcgagaacgagtacgacgagtacaagaaggaggagaaggagcacaagcacaagcagcacctcagcgaggccggcgccatcgccgccggcgccttcgcactctacgagaagcacgaagcaaataaggacccggagcacgctcaccgtcacaag

SEQ ID NO: 14796 - DNA, 390 bp, Zea mays
  Clone ID: LIB3159-019-Q1-K1-E11
ctgaaaaccagcacgccacgtcctaccgccaaccatcgcgctccggctctccccaattgtgagcgagacggggcacaggaagaggagagcctaaaaccctaaccccccgaatcggatccggccgccggagcgcggaaccccaccccggccgccatggagatgggagggatgagcgacgctgagcggctgttcttcttcgagatggcctgcaagaactccgaggtcgcgtacgagcagaaccccaacgacgccgacaacctgacgcggtggggcggcgcgctgctggagctgtcgcaggtccgaaccggccccgacagccttaagcttcttgaagatgcggaagccaaactggaggaggcacttcaaattgatcccaacaagtccgatgca

SEQ ID NO: 14797 - DNA, 394 bp, Zea mays
  Clone ID: LIB3159-019-Q1-K1-F9
ggggccggcaggcgtacggaagttgatagcatccaaagtgattgacgacattgttattacccactacgccttcgcgcgcggtcacatagcaaaggaggtgcgggaggcctagctttctgtgctcatggccaacatgtctacgctatcggatcgtgaagaatacaacgagcttgtggagaaggacccaacgctcgttgcggagatttatgaagcatatctcaaccggcaagtcaacactgcagctgggaaggacacaaattgtagcaacaggaagtgataattacgaacagaactcgtgcagtagcaatattctaactatgcatttatgcattcatgtaagcaagttaagaacatcatattctaaccaagaacaaacatgcacgcgagaagaata

SEQ ID NO: 14798 - DNA, 378 bp, Zea mays
  Clone ID: LIB3159-020-Q1-K1-B2
cctacatctccgtccgcaagcgtcagccaggctgccccgggaggccgggaggaagcagatcggagaaggcaagccacggatttccttctcgccttctggaccccatgtgatctgttgtaatggctcgattgtacatcggcaacctggatccccgggtgaccgctcgggagctggaggacgagttccgcacgttcggggttcttcgcagtgtctgggttgctcggaaaccacctggctttgcgtttattgattttgatgataagagggacgcagaggatgcaatccgtgacctagatggcaagaatggatggagagttgagttatctcgtaatgccagcggtggtcgtggaggtcgtgaccggcatggtgggtctgagt

SEQ ID NO: 14799 - DNA, 322 bp, Zea mays
  Clone ID: LIB3159-020-Q1-K1-B4
cccgggtctccctccccccatccctgcacgcctcttttcatgcgcgaggaggggccgtggggaccaccaccagcacctccatccgcgcgcatctcgcggtggtgctcctcctcctcctccccctgctcccggggcgggcgctctcctgttcctcctcctcctgctgctggtgccagggccgggagggcggcgcggaggtggcgctcatggggctcgccggggacgggtcggcggacaccgccaacctcagtaatagtgaaaatggtcggttcagttatgggagttgcaaggttcttccccgggaaaaagaagcatcgatggg

SEQ ID NO: 14800 - DNA, 311 bp, Zea mays
  Clone ID: LIB3159-020-Q1-K1-B5
cggacgcgtgggcaagcactcgctggggcagtttccaccctgtgcgcctggtgccctacaacccggacttgctggacgagtcggtgctgtggacggagagccgcgacgtcggcaacggcttccgctgcgtccgcatggtcaacaacatctacctcaacttcgatgccctccacggcgacaagtggcacggcggcgtccgtgacggcaccaacgtcgtgctctggaagtggtgcgagggcgacaaccagcgctggaagatccagccctactactgaaccaacggatgatatgaccatcgcccccatcgatcg

SEQ ID NO: 14801 - DNA, 238 bp, Zea mays
  Clone ID: LIB3159-020-Q1-K1-B9
agacacgtgccttgctgtagtcactttattagctaccattacctcctgagtctgttaagaatcgagaatgtcattgttccatccgcggttatgatgatgaaaaatacgattcttcaattcaaaatgtaacactaatacgagtaatgatgcatgaaattaacttgaagaagttgtgcaactcagttgtttttctgaaaaaaaaaaaaaaaataaaaaaaaaaaaaaaaaaaaataaaaa

SEQ ID NO: 14802 - DNA, 379 bp, Zea mays
  Clone ID: LIB3159-020-Q1-K1-E3
atagctacctactactcaagtatccatccttattgagtacagggttgatccatggactcggaaggagttgtagcagcaaaggtggcagatgagactactaaaccggcaatccaagaagacggcgccgagagcaaggccgggatgactgatctgctgatgctgaccgacaagtcgcagctgcaggcgctggcgatgctgctgcggaacaacgaggagctcatgatgagccaggcgatcaagtcggagacggagcgcattgagtacctcaagacggtgagcgactgctacacgcggacgatgaagctcctcgacgattccatggcggccaggaccacgtacgagcgttcgggcggaatgaggagcctcgtcgcccggacat

SEQ ID NO: 14803 - DNA, 301 bp, Zea mays
  Clone ID: LIB3159-020-Q1-K1-F4
agtcagaagccgaacactgatattgagcgcatgttactgatgggtggatttgctgaagtgcagtcttctgctgcaagctcgcaggatagcgtgcaatctgttacagttaaggcaaagaaggctagctggagcatgggctcttcttttccccttaagaaaacaacaaaagcccttcccaagattcaaattgacgacgactctgatctgattgatgaagacagtctcttgactgaagaagacctgaagaaaccacaacttccaattgttggggacttggaagtgggggcagcaaaaaaagcat

SEQ ID NO: 14804 - DNA, 308 bp, Zea mays
  Clone ID: LIB3159-020-Q1-K1-G4
aagcaagcaagcagcgagtacatacatactatgcagccagtcagccatggcgcccaccgtgatgatgggctcgtcggccaccgccgtcgctccgttccaggggctcaagtccaccgccagcctccccgtcgcccgccgctcctccagaagcctcggcaacgtcagcaacggcggaaggatccggtgcatgcaggtgtggccggcctacggcaacaagaagttcgagacgctgtcgtacctgccgccgctgtcgacggacgacctgctgaaacaggtggactacctgctgcgcaaccgctggataccct

SEQ ID NO: 14805 - DNA, 283 bp, Zea mays
  Clone ID: LIB3159-020-Q1-K1-H3
gtggagctgctagtgcccgacgacgtgtacattctggaccaggccgaggaggacggcatcgacgtgccctactcctgccgcgcggggtcctgctcctcctgcgccggcaaggtcgtctacggctccgtggaccagtccgaccagagctacctcgacgacggtcagatcgccgtcgggtgggtgctcacctgccacgcctaccccacctgtgacgtcgtcatcgagacgcacaaggaggatgagctcaccggcgcataatcattcatgcccatccatctctatc

SEQ ID NO: 14806 - DNA, 196 bp, Zea mays
  unsure (1)..(196): unsure at all n locations; Clone ID: LIB3159-020-Q1-K1-H6
ccgccctaagaagacccgtgccatccgccgccgtctgaccaagcaccagctctctctgaagaccgagagggaaaagaagcgtgagaagtacttccccatgaggaagtatgctatcaaggcctangcattgcttgatgagcgcaaaaaaaaaaaaaaacacgaagaagaaagaagaggaaaccaaagtattttattt

SEQ ID NO: 14807 - DNA, 143 bp, Zea mays
  Clone ID: LIB3159-021-Q1-K1-A11
tcgctagcggtagagcgtaaagaggggcgtggttcagaacagcatgacgatggtcatcgatctcctcgtgtgcctggctctgtcagttgacagcacctctccaatgcagatgccctgcccttgcgctatgctgcacgtcttgt

SEQ ID NO: 14808 - DNA, 402 bp, Zea mays
  Clone ID: LIB3159-021-Q1-K1-A3
cacttactgacatcaagattgacatcaaacgtgtcctcaagaagacagccctgatcaaggcgagggaggaagctgatgtgaagaccaagtgggagaacagctcatggggcaagaagctgattgtccagaagaggagagcatcgctcaatgactttgataggttcaaagtcatgctggcgaagattaagaggggcggtgctatcaggcaagagctcgccaagctgaagaaggcgtccacggcttaaggagtctctttccgcgaatgtcatgttagagtttttggttatgagttggatcagcaattcgattgagcgttgtcaaagccagaattaccaatatgttccctgtaaacccatttcaaactttatcaagcacgggcgtgctcaggatacttttgccatg

SEQ ID NO: 14809 - DNA, 433 bp, Zea mays
  unsure (1)..(433): unsure at all n locations; Clone ID: LIB3159-021-Q1-K1-B6
accccgcgccgacccacgcgtccggtcggagctggggcctcatcttgatcccagtctgccggtcgcggaatctctcttcccgcgagcgacgactgggcgacctgcgccgccacannaaaccctactccaggtgcccaggtctgcgtcgggcccttgccggcgacgagcacccgctagttaccactgtgcggtttccaagatggctcgccgtggattgatggaacaggacttaagcaaattggatgtgacaaagcttgacccactgtcacctgaagttatctcacgccaagcaacaatcaatattggtaccattggccatgtggctcatggaaagtctactgttgtgaaggctatatccggagttcagactgttcggttcaagaatgagctggaacgtaacaatactataaagctgggctatgctaatgcaaaa

SEQ ID NO: 14810 - DNA, 162 bp, Zea mays
  Clone ID: LIB3159-021-Q1-K1-B9
tctacccacgcgttctctttaatgctgagcataaacatgagcggcgctcataacacaatgaaggaggtgcatcgatcatcatctgtacccagaatatgcaacgtccaacccaactctaatacctacccatgttcctgctacttcgagaggtttattgcccac

SEQ ID NO: 14811 - DNA, 457 bp, Zea mays
  Clone ID: LIB3159-021-Q1-K1-C12
ctgatcttcaacactgggcactggtggaacaattataaaacaatcagggggggtgcctacgtggaagttggcgatgaggtcaaaatgggcatgagtgttgctgaggcttacagaagatcgatagagacattgtccgattggcttcgcaaagaagtcaacacgagcaagacccatgtcatctaccgcacatatgctcctgtgcatttcagagatggtgactggaagactggtgggagctgccacttggaaactcttccagacgcgatgccagtgaagtccctggacgaatgggccgacttgctccaacccgtggacgaatttctagggagcgatcttggatccgagctggctggtgtagacctgcttcgcgtgacgggaatgacggcccagagaaaagacggccacctctcggtctacctgagcccctcaggacccgtgccccgctacagacaggact

SEQ ID NO: 14812 - DNA, 448 bp, Zea mays
  Clone ID: LIB3159-021-Q1-K1-D11
gctatggccgccgcgagctgacgaccagcctagtggagcggtttacgagctcgggagcgcctctctccgcaatgacaagtccgagcatgcggcggactacgaggcgattattgcagcggtgaagggacagagtgccaaggcgaagcagctcgcagcgcagcttatccccaggttcttccggagcttccctgcactcggcacgcgcgccatgtcagccatgttcgatctcgtcgatatggaggagctcgcgatcagaatacaagctattcgtggctttccacttcttggcaaagatactgaatttgtgtcaaaaattgcagatgttttgggtcagctccttacaagcgaggaaaatgttgagcgtgatgctgttcataaagcgctcatgtcccttatacggcaagatgtaaaaaatcattacaaccttatttaacatgtggagcaggat

SEQ ID NO: 14813 - DNA, 181 bp, Zea mays
  Clone ID: LIB3159-021-Q1-K1-E1
acggaaagattcaagcaaatggtttacacctacttatattatgcctctaggcaatgagcagcgacaggtgaaggcagttctgttgtggacagtatgactaaagcaattgatgaggtaatcaaaataaacgatggagacttcacctgttgtaatccaacttaggagccgattccatttttga

SEQ ID NO: 14814 - DNA, 198 bp, Zea mays
  Clone ID: LIB3159-021-Q1-K1-F3
acggttattctgcccaaaatgccttgtgctgtgaattacatctcctgcttgtcccaaggacagggggggaacatacccaacctggagcagcattatggtctgagcaagaactgcacatgaagtgactatcctgatagaggcctacacgaccctgagggacacgggccctgtcccatgcaatcaacatgtgagagacct

SEQ ID NO: 14815 - DNA, 212 bp, Zea mays
  Clone ID: LIB3159-021-Q1-K1-F6
acgcaccgatgttacttactaccatcataccttcatttttcctccgaccaccctatctcaccggagtggtacccaacaggttgggtcactaccagctgttatgaccaaaactcctcatcaaaaactattaacacgggctcaacaaccatttgatccattaactcattatttactatgtcatctacatctatttaacctaattgttcctcaat

SEQ ID NO: 14816 - DNA, 309 bp, Zea mays
  Clone ID: LIB3159-021-Q1-K1-F8
acggttgtggaggctaatacctcatatactggtaatcattttcatgccaaatgccactttggggcggtagatatattcaaccggaagaagctctaatatattgttccttcttcacacaactgtgatattccgcatgtgaaccgcactgactatcagctgattgatatatcaccaaatggatttgcgagccttcttacttaagatggcaccactaaagatgatcttacactcccaactgatgaaacttttgttgcccatatcaaggaagggtttgaaagtggcaacgatcttcttgtgactgtccaccct

SEQ ID NO: 14817 - DNA, 406 bp, Zea mays
  Clone ID: LIB3159-021-Q1-K1-G3
tcggcttaaccttactttccctgctgcaacccaagctagcccgcacgacacgacaccaaatcggggagctcgagagggcaccaataatggccggcgtgaactccagcgtcgtccggctcaagcccgccgcggcagtgccgcaggccgccgccgtctcatagccggcgaagcgggtgcagctggccgcgcccgagggccgccgcgccgctctgctcggcctggcggccgtcttcgccgtcacggccaccaccgggtcggccaaggccacgatcttcgatgagtacctcgagaagagcaaggccaacaaggagctgaacgacaagaagaggctggccaccagtggagccaactttgcgcgcgcctacaccgtggagttcggtagctgccagttcccctacaacttcac

SEQ ID NO: 14818 - DNA, 517 bp, Zea mays
  Clone ID: LIB3159-018-F2-F4A
aaaaacaggtaagaattgatcacagtactacaagacgcaggagacatgacattttatattatcatgatgaaaaaaatgacggaagaggggaatcccgaaagcataaccgccatgaatcaaacgaccggtgggtagccacaaatagtgatgttgattcggatgtagatagatatcagagttcaagctgtaaaggcactaggttgggaaggaaggatgatgatccaggcattgaagttcggcatcagaggtcaggtagaagtacgaaggatgacaagagaaggaaacatcacagtggaaacaggtggcacagtggcactgaagagggtacctcagattcaagcggtggagatttgagctctgattcgtggagtggtagatcgagaaacagtgagaacttttcagcacacaggtcaaagaggaagcgaagtcggagcaaggagtctggttattagttgtaaatagttagcctctttttggagcacatgaattcgtaggaatcgtgcagaaattttacagg

SEQ ID NO: 14819 - DNA, 632 bp, Zea mays
  Clone ID: LIB3159-021-Q1-K1-C12-M1
cttatcttcaacactgggcactggtggaacaatgagaaaacaatcagggggggtgcctactttcaagtaggcgatgaggtcaaaatgggcatgagtgttgctgaggcttacagaagatcgatagagacattgtccgattggcttcgcaaagaagtcaacacgagcaagacccatgtcatctaccgcacatatgctcctgtgcatttcagagatggtgactggaagactggtgggagctgccacttggaaactcttccagacgcgatgccagtgaagtccctggacgaatgggccgacttgctccaacccgtggacgaatttctagggagcgatcttggatccgagctggctggtgtagacctgcttcgcgtgacgggaatgacggcccagagaaaagacggccacctctcggtctacctgagcccctcaggacccgtgccccgctacagacaggactgcagccactggtgtcttcctggagtccccgatgcctggaacgagcttctctacgccctcgtcatgaggaggcataagaagatggccggcactaggacaccggacgctgaagagggagatgtcttcagcagtggatcatcatcgtgacaaaacgagcttcggagccatccatccat

SEQ ID NO: 14820 - DNA, 678 bp, Zea mays
  Clone ID: LIB3159-021-Q1-K1-C12-N1
agggctaaaagaatacatatgtacatcattcgctgtagcgaccctagctagttacactgccaattccaaatacctccccattagccatacaagttgccatcaccacacacaaagctatactaccactgacgtctagctcagcttcttgcaaacagcacccatggtccaaaaacgtgtctcgccattccggcatcctatgtgaaacagcagctgtcatcgcctagccaggatggatggatggctacgaagctcgttttgtcacgatgatgatccactgctgaagacatctccctcttcagcgtccggtgtcctagtgccggccatcttcttatgcctcctcatgacgagggcgtagagaagctcgttccaggcatcggggactccaggaagacaccagtggctgcagtcctgtctgtagcggggcacgggtcctgaggggctcaggtagaccgagaggtggccgtcttttctctgggccgtcattcccgtcacgcgaagcaggtctacaccagccagctcggatccaagatcgctccctagaaattcgtccacgggttggagcaagtcggcccattcgtccagggacttcactggcatcgcgtctggaagagtttccaagtggcagctcccaccagtcttccagtcaccatctctgaaatgcacaggagcatatgtgcg

SEQ ID NO: 14821 - DNA, 152 bp, Zea mays
  Clone ID: LIB3159-013-D3-F1B
aatccgagcaagtaaccattatgcagtgtccacatcgcgagctagcaatgtattagtaccgtaatctagctgatctgataaagccaatcaactttgcaacaacacactacagacgttataaggaaaactttaaacataagcatgcgcggcgc

SEQ ID NO: 14822 - DNA, 152 bp, Zea mays
  Clone ID: LIB3159-013-D3-R1B
gcgccgcgcatgcttatgtttaaagttttccttataacgtctgtagtgtgttgttgcaaagttgattggctttatcagatcagctagattacggtactaatacattgctagctcgcgatgtggacactgcataatggttacttgctcggatt

SEQ ID NO: 14823 - DNA, 508 bp, Zea mays
  Clone ID: LIB3159-018-F2-F1B
gaagccactaccgcatgtttggagtgcgggaaatttttcgtgcgaagttaaaccgattcctgtaaaatttctgcacgattcctacgaattcatgtgctccaaaaagaggctaactatttacaactaataaccagactccttgctccgacttcgcttcctctttgacctgtgtgctgaaaagttctcactgtttctcggtctaccaatccaggaatcagaggtcaaatcgccaacggatgaatctgaggcaccctcttcagctgccgctatcccacctgtttccactgggatgtttccttctcttgtcatccttcgtacttctacctgacctctgatgccgaacttcaatgcctggatcatcatccttccttcccaacctagtgcctttacagcttgaactctgatatctatctacatccgaatcaacatcactatttgtggctacccaccggtcgtttgattcatggcggttatgctttcgggattcccctcttccgtcaattttttc

SEQ ID NO: 14824 - DNA, 603 bp, Zea mays
  Clone ID: LIB3159-018-F2-R1B
agtcatagttgaagatattgatcaaagctatgaagaattttatgaagatgtacatacagaatttctgaaatttggtgaacttgtgaatttcaaggtatgtagaaatgggtctttccatcttcgagggaatgtttatgtgcactataaatcgttggattcagctcttcttgcctacagcagcatgaatggacgctattttgctggaaaacagatggaaggcggccatatgcggtgagtacatgaggtcaagatacaagacatgttcacatggagttgcttgtaattttattcactgcttccgcaatcctggaggagattatgagtgggctgattgggacaatcatcctcctagatactggattaggaagatggttgctctttttggtccctcagttgatgagatgaatgaaaaggcgagtcataccccagattttagaagttcagtgggctctgataggaagaaacttaaaatttccagcaacagatatgtttcaagaggatctaggaacgaagatgtgcatacacgacactctcctcaagattattcacattctaagcaagaacgaagtagccacaacatgaattatgagtacagacgacata

SEQ ID NO: 14825 - DNA, 519 bp, Zea mays
  Clone ID: LIB3159-018-F2-R2B
gttcacagatgaagagattgaacaaagctatgaagaattttatgaagatgtacatacagaatttctgaaatttggtgaacttgtgaatttcaaggtatgtagaaatgggtctttccatcttcgagggaatgtttatgtgcactataaatcgttggattcagctcttattgcctacagcatcatgaatggacgctattttgctggaaaacagatggaaggcggtcatatgcggagagtacatgaggtcaagatacaagacatgttcacatggagttgcttgtaattttattcactgcttccgcaatcctggaggagattatgagtgggctgattgggacaatcatactcctagatactggattaggaagatggttgctctttttggtcccttacctgatgagatcaatgaaaaggccagtcataccccaaattttagaaactcagcgggctctgataggaagaaacttaaaattttcagcaacagatatgtttcaagaggatctaggaacgaagatgtgc

SEQ ID NO: 14826 - DNA, 606 bp, Zea mays
  unsure (1)..(606): unsure at all n locations; Clone ID: LIB3159-017-Q1-K1-E7.F2
ctgttaaaaacatcagtgtctcagactggtattagcatagcaccaaaagtggcttattagatgttcagaattgagcgacactacagtcaaagatgcacaacacttgacactagcttgtacacagtaaaattcttgtgtggggcgccgtncacatcaggagacgaaacaaaactcctgcgctctcttatttaaccaagatcagggactatgaggtaatcctcgtcgtcggtgacctcgatccgggccttcttgctctggcgaaccccagcgccgccgccggcggcggttttggccggcctgtagtacgccgtgtcgttcgccgcctggtatccgaaaagctccggnacctccgccaacgtcctgctggctttgggcgcctgctcgtggaagaggtcgatgttgggngaaccactccagcttcttgaacccgagcgttggctccttgtgcagtttgtcggtggactcgttttcggggaactgcaggagctcgtngacggcccagccctgcggcaggaactgcggcggggaaggcacctgctgcaccgcggcggaaacggcggcgtgcggtggcttgttggtggccttggccggggcgttggtggtcgg

SEQ ID NO: 14827 - DNA, 629 bp, Zea mays
  unsure (1)..(629): unsure at all n locations; Clone ID: LIB3159-017-Q1-K1-E7.R2
tcgcccctcccttgccgtccacttcttcctccaccacagtcatcagtggcgttatcctcttcgttctcgcctccctggttgttgttggctgggtgttggcgagctgggagtagagaccgagaagtggagcggccatgaagatccagtgcgacgcgtgcgagggcgcggctgccacggtggtgtgctgcgccgacgaggccgcgctgtgcgcgcgctgcgacgtcgagatccacgccgccaacaagctcgcgagcaagcaccagcgcctcccgctcgaggcgctctccgccaagctcccgcgctgcgacgtctgccaggagaaagcggcgttcatcttctgcgtggaggaccgggcgctcttctgccaggactgcgacgagcccatccacgtcccgggcacgctctccgggaaccaccagcgctacctggccaccggcatccgcgtcggcctcgcctcggcttccgcctgcagcgacgcctgcgacgcccacgactccgaccaccacgccccgcccaaggccaccatcgagccaccgnacgccgccgtctccgccgcggtgcagcaggtgccctcgccggcgcagttcctgccgcagggctggggccgtcgacgagctcctgcagttctc

SEQ ID NO: 14828 - DNA, 533 bp, Zea mays
  Clone ID: LIB3159-018-F2-F3A
tgattcatgctaagatatgcactgctgtggcatgaaggtgccaacttcaaccaaactatatgtcttttctaaaatatagtatcttaagattccttataaattactgcacggtaccaagctggaacgatgtagtcgcatcaggagttatgagctcagacgacatagaatagatttttcagcagcagataagcaccgaagacaagatgttggagatacaaatgacagacaattttcaacaatgggaaatgacagcaagtcccataggcataagcatgaagaacggcatagaagtgatcatggtaatggagaaaaagaagatgacagcaaaactaggcctaggaagcactgttctgttaggcgtggaagtttggaggttggatattctgactggtctccagacttcactggtacagacaacagcaagggtccttcaggtgagaagtccactagcaggtatgatgatgccaaagggagcaggaggggatcatcagagtattacaatcttgaaagacaccactctacagctcaaaaac

SEQ ID NO: 14829 - DNA, 700 bp, Zea mays
  Clone ID: LIB3159-018-F2-R3A
gtggagtacggccagctcctggccgagcacgacgagcagttgctgtgggtacgctacccactgtgacctgtatgctgaaaagttctcactgtttctcgatctaccactccacgaatcagaggtcaaatttccaccgcttgaatctgaggtaccctcttcagtgccgctgtgccacctgtttccactgtgatgtttccttctcttgtcatccttcgtacttctacctgacctctgatgccgaacttcaatgcctggatcatcatccttccttcccaacctagtgcctttacagcttgaactctgatatctatctacatccgaatcaacatcactatttgtggctacccaccggtcgtttgattcatggcggttatgctttcgggattcccctcttccgtcatttttttcatcatgataatcttcaatgtcatgtctcctgcgtcttgtagtgctgtgctcatttcttgattgtttttgagctgtagagtggtgtctttcaagattgtaatactctgatgatcccctcctgctccctttggcatcatcatacctgctagtggacttcttacctgaaggacccttgctgttgtctgtaccagtgaagtctggagaccagtcagaatatccaacctccaaactttcacgcctaacagaacagtgctttctaggcctagttttgctgtcatcttctttttctcca

SEQ ID NO: 14830 - DNA, 174 bp, Zea mays
  Clone ID: LIB3159-019-Q1-K1-C2.F27
acttactgcatggaatgtcccagggtcccaaacttgtcgtcgcagtacatcgtgctgatccggtacagttgctgcatgctcagcactgggcagaagtcgtctgtgatctccgcgagactccggctatgcttgtcgtcacccacgcgtccgcccacgcgtccgcggacgcgtggg

SEQ ID NO: 14831 - DNA, 520 bp, Zea mays
  Clone ID: LIB3159-002-Q1-K1-H1.F1
agaagagactatcagcttgtgctgtcttcgccactggtccaccactgccagtaagctttgagaatttaacaatatttggtaatttctgcagtttgaggcaagccttatatagtacaataaatggtgttagcaggcactacgcagtttcataaccactaaagaatgatactccatgtgctgtttggagagcaggaattctcacaagaaaacagtccaatcggcaggtcttggagaaaactatagccttgcaaactgagaccaacagcactgagctcgagccttgcaaccgcgtgtccacgcttcatgggcgacttaacttacagtaaattagcacaatatcgaccgtttttgtttcttgcaaacatgattgaagcaccaaagtttaaagtattgtgcaaatttggtttgtcttctttgcctgcttgtagaacatctgagaagcagcacttagatcagaacttttctcaaccaagctatccagtctctttcctctgggcagggcactatcaataagttttat

SEQ ID NO: 14832 - DNA, 550 bp, Zea mays
  Clone ID: LIB3159-002-Q1-K1-H1.F2
tttttttttttttttttttttttttttttagaagagactatcagcttgtgctgtcttcgccactggtccaccactgccagtaagctttgagaatttaacaatatttggtaatttctgcagtttgaggcaagccttatatagtacaataaatggtgttagcaggcactacgcagtttcataaccactaaagaatgatactccatgtgctgtttggagagcaggaattctcacaagaaaacagtccaatcggcaggtcttggagaaaactatagccttgcaaactgagaccaacagcactgagctcgagccttgcaaccgcgtgtccacgcttcatgggcgacttaacttacagtaaattagcacaatatcgaccgtttttgtttcttgcaaacatgattgaagcaccaaagtttaaagtattgtgcaacattggtttgtcttctttgcctgcttgtagaacatctgagaagcagcacttagatcagaacttttctcaacccaagctatccaatctctctcctttggcccagacactatcaatagttttatg

SEQ ID NO: 14833 - DNA, 602 bp, Zea mays
  unsure (1)..(602): unsure at all n locations; Clone ID: LIB3159-002-Q1-K1-H1.R1
cgcatccagcaaccgaatccaacaagaaanngaaantaccgttctttatattccttctcnactgcaatctncntccatccatccagcgagctcnnagcaagcgagaaatcagatgcacgtggagctctccataaaaagaaggaaaatcacagcgctccttgtgctaaatggatcnaggtccnaaacggataggtcgtggtccgggcgccaatgnagcgggaaacnagtcgggggggcaagcacaagnacggcaaccacttcgactacgtggaggggaccgggggggcggggggggcggaggggggggggggggggggaggggggcagggggggagggggagggagtaggggggggggggggggagggggggggggggggagggggggggagtagggggggggggggggggaggggagggggagggggggaaggggggcaggggggggtagtgagggggggagagggagggggtggggaggaagggggagggaagggggggggagggaggggggggagagggggtggggggggggggagagacggggaggggagggggggaggagggaggagggggggggggggagagggggagggggggggg

SEQ ID NO: 14834 - DNA, 578 bp, Zea mays
  Clone ID: LIB3159-002-Q1-K1-H1.R2
gcgaccgaatccaacaggagaggaaaggggcgcttgctttatattccttctcggctgcaatctgcgtccatccatccagccgtctcggggcagccaagaggtcgtgtgcgcgtggatctctccgtagaagggatgaagatcacggcgctccttgtgctgaagccgtcgacctccggagccggtagctcctcgtccggcggccagtcgggcccggaggcggtcgtgctcgcgaacgcgacggacgtcagccacttcggctacttccagcgcagcgccgcccgcgagttcatcgtcttcgttgcccgcaccgtcgctcagcgcacccagccaggccagcggcagtccgtccagcacgaagaatataaggttcactcccacaacagaaatgggctttgtgcggtggcatttatggatgatcactatcctgtacgaagtgcattttctcttctgaatcaggttcttgatgaggtccagaaggcttttggggaatcctggaaatctgctactgcagatggaactcaaccagggggctttcctgacagacgccttgggcaagattttaaggaccctgcggaagc

SEQ ID NO: 14835 - DNA, 499 bp, Zea mays
  Clone ID: LIB3159-012-Q1-K1-F4.F1
aaataacttgggcagcggcatttcaatgggtatacatatagggctgttcccagcattatattgtaccttctgcttctgttgaagacgcgctgtccagactgaggacgcatcgatggccgatgggcgcgtgtgtgtgtgtaagccaccatgtgtgtgtgagacataaatcatgtacatctggaaatagggccgcttgatcatcatcatcaggcagcgcgcgtctccgtcagctcgaaccgaattcctcgttccagttctccagctcgtcccatttgctcttctgcaagcttggcctgatcaccgtcatcgcgttcttgaagtcctcgtacctcaaaggtcgcagctgatttgctttgatagtaagaatattttgtggaccgagctctcttattggcatcattgcagcttcttcacacaaggctctcaggtcacttccagaatacccttcggtctccacagcaagtctttcaaaatcatggttcgacagtttgaatgattg

SEQ ID NO: 14836 - DNA, 506 bp, Zea mays
  Clone ID: LIB3159-012-Q1-K1-F4.F2
aaataacttgggcagcggcatttcaatgggtatacatatagggctgttcccagcattatattggaccttctgcttctgttgaaaaccccctgtccaaactgaggacccatcgatggcccatgggcccctgtgtgtgtgtaaaccaccatgtgtgtgtgaaacataaatcatgtacatctggaaatagggccgcttgatcatcatcatcaggcagcgcgcgtttccgtcagctcgaaccgaattcctcgttccagttctccagctcgtcccatttgctcttttgcaagcttggcctgatcaccgtcatcgcgttcttgaagtcctcgtacctcaaaggtcgcagctgatttgctttgatagtaaaaatattttgtggaccgagctcttttattggcatcattgcagctttttcacacaaggctctcaggtcacttccaaaatacccttcggtctccacagcaagtctttcaaaatcatggttcgacagtttgaatgattgtcctttg

SEQ ID NO: 14837 - DNA, 514 bp, Zea mays
  unsure (1)..(514): unsure at all n locations; Clone ID: LIB3159-012-Q1-K1-F4.R1
tgaattttgcaaataaatctttctgatagtagaagttcntggtgagcaaaaggatattgatagtgtcatgtctacaaggttagctaatgagaatgactctagcaggcgtctgaaatctgaatttcttatccagtttgatggggtgtcctcaaacccagatgatctagtaattgttataggggctactaataaacctcaagaattggatgatgctgttcttcgaaggctggtaaaaagaatatatgtgccactacctgatccaaatgtacgaagttacttctgaaaaatcagctcaaaggacaatcattcaaactgtcgaaccatgattttgaaagacttgctgtggagaccgaggnnattctggaagtgacctgagagccttgtgtgaagaagctgcaatgatgccaataagagagctcggtccacaaaatattcttactatcaaagcaaatcagctgcgacctttgaggtacgaggacttcaagaacgcgatgacggtgatcaggccaagctt

SEQ ID NO: 14838 - DNA, 568 bp, Zea mays
  unsure (1)..(568): unsure at all n locations; Clone ID: LIB3159-012-Q1-K1-F4.R2
tgattttgcaaataaatctttctgatagtagaagttctggtgagcaaaaggatattgatagtgtcatgtctacaaggttagctaatgagaatgactctagcaggcgtctgaaatctgaatttcttatccagtttgatggggtgtcctcaaacccagatgatctagtaattgttataggggctactaataaacctcaagaattggatgatgctgttcttcgaaggctggtaaaaagaatatatgtgccactacctgatccaaatgtacgaaggttacttctgaaaaatcagctcaaaggacaatcattcaaactgtcgaaccatgattttgaaagacttgctgtggagaccgaagggtattctggaagtgacctgagagccttgtgtgaagaagctgcaatgatgccaataagagagctcggtccacaaaatattcttactatcaaagcaaatcagctgcgacctttgaggtacgaggacttcaagaacgcgnatgacggtgatcaggccaagcttgcagaagagcaaatgggacgagctggagaactggaacgaggaaattcggttcg

SEQ ID NO: 14839 - DNA, 524 bp, Zea mays
  Clone ID: LIB3159-017-Q1-K1-C4.F1
gggaccccaaagcatgctatagtctcacacatgcatgtccaatgctccgaattttacagcagaatacttgtcaataactcaatcgataccaatgctagggtccgaagcctctttgatttaggtacctatattatataccattgtctttagtcaacttaacacggcaccgaataaagctgagctctgtgatcaggttggcgcaaaacacgcaaacatgctgcaatttttccttcactggaccttagtttgtctactacaggttatagctcatccttgacgttgtcaggggccgctactgtctccacgtctggtatttgcagcttctccttgatcagtttggccatgtccttgacactcgatttctttgaaagcttgatcgggttgtttttgtcttcagcaagataaaggaatagcgtcgggtaattattcaccttcaatttgggatgttcattcacagaagcatctatgcgtgcaaatttaagattgtccgaaccactgaaatgcttcgccaacttctcaacatt

SEQ ID NO: 14840 - DNA, 533 bp, Zea mays
  Clone ID: LIB3159-017-Q1-K1-C4.F2
gggaccccaaagcatgctatagtctcacacatgcatgtccaatgctccgaattttacagcagaatacttgtcaataactcaatcgataccaatgctagggtccgaagcctctttgatttaggtacctatattatataccattgtctttagtcaacttaacacggcacgcgaataaagctgagctctgtgatcaggttggcgcaaaacacgcaaacatgctgcaatttttccttcactggaccttagtttgtctactacaggttatagctcatccttgacgttgtcaggggccgctactgtctccacgtctggtatttgcagcttctccttgatcagtttggccatgtccttgacactcgatttctttgaaagcttgatcgggttgtttttgtcttcagcaagataaaggaatagcgtcgggtaattattcaccttcaatttgggatgttcattcacagaagcatctatgcgtgcaaatttaagattgtccgaaccactgaaatgcttcgccaacttctcaacatttttactta

SEQ ID NO: 14841 - DNA, 554 bp, Zea mays
  Clone ID: LIB3159-017-Q1-K1-C4.R1
caagtatctgatggaggcagatatcaatgcaaacaacctgagggagttctgcttaagtcttctaggatggcacgctcccgccataccacaaatcagaaccattgcctcaagagaagggacttattgaaaaggttgttggtcgtacatttgattcttctgtgctggaaagtcatcaaaacgtcttccttgaggttcatacaccttggtgtgttgactgtgaacgataagtaaaaatgttgagaagttggcgacagtttcagtggttcggacaatcttaaatttgcacgcatagatgcttctgtgaatgaacatcccaaattgaaggtgaataattacccgacgctattcctttatcttgctgaagacaaaaacaacccgatcaagctttcaaagaaatcgagtgtcaaggacatggccaaactgatcaaggagaagctgcaaataccagacgtggagacagtagcggcccctgacaacgtcaaggatgagctataacctgtagtagacaaactaaggtccagtgaaggaaaaattgcagcatgtttgcgtgtttt

SEQ ID NO: 14842 - DNA, 564 bp, Zea mays
  Clone ID: LIB3159-017-Q1-K1-C4.R2
caagtatctgatggaggcagatatcaatgcaaacaacctgagggagttctgcttaagtcttctggatggcacgctcccgccataccacaaatcagaaccattgcctcaagagaagggacttattgaaaaggttgttggtcgtacatttgattcttctgtgctggaaagtcatcaaaacgtcttccttgaggttcatacaccttggtgtgttgactgtgaagcgataagtaaaaatgttgagaagttggcgaagcatttcagtggttcggacaatcttaaatttgcacgcatagatgcttctgtgaatgaacatcccaaattgaaggtgaataattacccgacgctattcctttatcttgctgaagacaaaaacaacccgatcaagctttcaaagaaatcgagtgtcaaggacatggccaaactgatcaaggagaagctgcaaataccagacgtggagacagtagcggcccctgacaacgtcaaggatgagctataacctgtagtagacaaactaaggtccagtgaaggaaaaattgcagcatgtttgcgtgttttgcgccaacc

SEQ ID NO: 14843 - DNA, 526 bp, Zea mays
  Clone ID: LIB3159-019-Q1-K1-C12.F1
agttcaatctaacatttattctgcttccaatatacgtgtacattattagaactaggagcgcaaccctaaaaaaaagcatagctgcattattccaaccaccgcacatagctagctactcacaaaaaagctgattgattcatgagacagctaggcggccggcaagacagccctcggcgttgccaagatagaacaccaagaacaccaagacaacaaagcgcctttcagtcaagttgacggggccaggccgggtcactaccgcttgccagctcccaggactcggcaccggtactctcccagagcccagatcgggaaggtgttcctgtactgggagtaactgatcatgcagttcttgttgaacactcctatgatctcttgctggggaaattctccgtcctctgactgcaatttatcaaaacccttgctgctcggtgtagaggcgcgggatctctctgggcctgtcctgcatcaatcagcgccagatggcccaaccagtgttcgctgcatgagctcggttgcctttgagatt

SEQ ID NO: 14844 - DNA, 534 bp, Zea mays
  Clone ID: LIB3159-019-Q1-K1-C12.F2
agttcaatctaacatttattctgcttccaatatacgtagtacattattagaactaggagcgcaaccctaaaaaaaagcatagctgcattattccaaccaccgcacatagctagctactcacaaaaaagctgattgattcatgagacagctaggcggccggcaagacagccctcggcgtgccaagatagaacaccaagaacaccaagacaacaaagcgcctttcagtcaagttgacggggccaggccgggtcactaccgcttgccagctcccaggactcggcaccggtactctcccagagcccagatcgggaaggtgttcctgtactgggagtaactgatcatgcagttcttgttgaacactcctatgatctcttgctggggaaattctccgtcctctgactgcaagtttatcaaaacccttgctgctcggtgtagaggcgcgggatctctctgggcctgtcctgcatcaatcagcgccagcatggcccaaccagtgttcgctgcatgagctcggttgcctttgagattggtgtc

SEQ ID NO: 14845 - DNA, 511 bp, Zea mays
  Clone ID: LIB3159-019-Q1-K1-C12.R1
cactgtatcacaaacgtctaatttcattgagagcattcagaaaagtgacggttcatggtatggctcttgggctgtttgtttcacgtacggcacttggtttggtgtgaagggactaattgctgctggtagaacatttgagagcagtcctgcaatcagaaaggcatgcggctttctgttatcaaaagagcttccttccggtggctggggagaaagctatttatcgtctcaagaccaggtttacaccaatctcaaaggcaaccgagctcatgcagcgaacactggttgggccatgctggcgctgattgatgcaggacaggcccagagagatcccgcgcctctacaccgagcagcaagggttttgataaacttgcagtcagaggacggagaatttccccagcaagagatcataggagtgttcaacaagaactgcatgatcagttactcccagtacaggaacaccttcccgatctgggctctgggagagtaccggtgccgagtcctgggagctggc

SEQ ID NO: 14846 - DNA, 540 bp, Zea mays
  Clone ID: LIB3159-019-Q1-K1-C12.R2
cagctgtatcagcaaagctgctaatttcattgagagcattcagaaaagtgacggttcatggtatggctcttgggctgtttgtttcacgtacggcacttggtttggtgtgaagggactaattgctgctggtagaacatttgagagcagtcctgcaatcagaaaggcatgcggctttctgttatcaaaagagcttccttccggtggctggggagaaagctatttatcgtctcaagaccaggtttacaccaatctcaaaggcaaccgagctcatgcagcgaacactggttgggccatgctggcgctgattgatgcaggacaggcccagagagatcccgcgcctctacaccgagcagcaagggttttgataaacttgcagtcagaggacggagaatttccccagcaagagatcataggagtgttcaacaagaactgcatgatcagttactcccagtacaggaacaccttcccgatctgggctctgggagagtaccggtgccgagtcctgggagctggcaagcggtagtgacccggcctggcccc

SEQ ID NO: 14847 - DNA, 264 bp, Zea mays
  Clone ID: LIB3159-019-Q1-K1-E5.F1
gaggaaaacagggtgatcgtaatgtgctcgctcctgcacgttcactgtagactgcaaatcagtaaagttccccaggaccacgccactcctgtcaacgctatacattttatacttggttcctcccatcgagcaggtgcaggtcgtaaacaccaaatcatgcgaatggcatacaaaatggtggctaaatggaagtgagcaaactcgattgcctggtcacggtatctaggccagatttgctgcctaatactagatttctaaatccca

SEQ ID NO: 14848 - DNA, 550 bp, Zea mays
  Clone ID: LIB3159-019-Q1-K1-E5.F2
gaggaaaacagggtgatcgtaatgtgctcgctcctgcacgttcactgtagactgcaaatcagtaaagttccccaggaccacgccactcctgtcaacgctagtacattttatacttggttcctcccatcgagcaggtgcaggtcgtaaacaccaaatcatgcgaatggcatacaaaatggtggctaaatggaagtgagcaaactcgattgcctgtcaacggtatctaggccagatttgctgcctaatactagatttctaaatccccaggtccgtttgtttttaccttgaccaacctcccacgtacccacctcatcctagccttttcttccgatgagggtgcgtcttcttccggttttcccccagggtaatcttccctggttccagccttttctgcagacctgggactgggaggatcttcttctagctctagtgtccctggaggacaagtttcagctgtgatgcctttatgctttgccgtgtcatcgaccatcgactgcctcacatgtaaatctattattccataatctccgttcgcacttttaagctttga

SEQ ID NO: 14849 - DNA, 561 bp, Zea mays
  Clone ID: LIB3159-019-Q1-K1-E5.R1
gtaatagacgagcaccaaaaactcctgagcagaggagaaaaattgcagaagccattgctgcaaagtggttggatcaagaatatcgtgaacgagtttgtagtggaattgctagctatcatggatcatcttctgcaactaaaacaccgagaaagccaagacctgctggagaaccaggtgtaaagaaacagacgacaaggaaaaaacctatgcaagccaaacctgtaattttagaggatgctcatggaaaaagtgcagctcttaagagaaagaaaagcgcaactccctacaaagatccgatggcagttgaaaaattggagatgatatcaaagattcgagctcaaaggacagcacaggaaatagaaaagaaagaagctattaggagggccaggacactgattgcagaagcagaaaaggctgctgatgctctggaaactgctgcagcgatgaacccttttgcccaagcatcacttatagaggctagaaagcttgttacagaggcaagaatatcacttgaatgtgttgatgatgaagagcctcaagaaactgcttccaatgatgtga

SEQ ID NO: 14850 - DNA, 563 bp, Zea mays
  Clone ID: LIB3159-019-Q1-K1-E5.R2
gtaatagacgagcaccaaaaactcctgagcagaggagaaaaattgcagaagccattgctgcaaagtggttggatcaagaatatcgtgaacgagtttgtagtggaattgctagctatcatggatcatcttctgcaactaaaacaccgagaaagccaagacctgctggagaaccaggtgtaaagaaacagacgacaaggaaaaaacctatgcaagccaaacctgtaattttagaggatgctcatggaaaaagtgcagctcttaagagaaagaaaagcgcaactccctacaaagatccgatggcagttgaaaaattggagatgatatcaaagattcgagctcaaaggacagcacaggaaatagaaaagaaagaagctattaggagggccaggacactgattgcagaagcagaaaaggctgctgatgctctggaaactgctgcagcgatgaacccttttgcccaagcatcacttatagaggctagaaagcttgttacagaggcaagaatatcacttgaatgtgttgatgatgaagagcctcaagaaactgcttccaatgatgtgtca

SEQ ID NO: 14851 - DNA, 541 bp, Zea mays
  Clone ID: LIB3159-021-Q1-K1-E10.F1
agctaacaccagaatttattaatcatttaaccccacagtatacacaagcctataatcagatgggaacaaggggaaaacgttggttgggattgtacgtgtacacaatagaaataaagaaaaaaaccatgatcagctgattttagcaccttgtccgcatccccagagtgttgattgggtaatcatgtacagggggccatattggacagtcaacagctcaaaaggctggattagttggtgcgaacgcctgattgcggaggcgccgactagctgaatgtccatgcatcaatggacgacagtgctttgcatgctgttctagttgcttcgccctggtttggttatcattgcatctcaatgcttgagccaataattcctaagctgagacatgtgcaggagtatctcgtcgcggccctggttggtcacgctgctcgtcatgatccaaggaggcgcggctcgaagtattcgcggattaggccctggaaagtttccacgttttcttcaggtttcctgccgccgttcttcttcttcttgcgcttgtcacatt

SEQ ID NO: 14852 - DNA, 548 bp, Zea mays
  Clone ID: LIB3159-021-Q1-K1-E10.F2
agctaacaccagaatttattaatcatttaaccccacagtatacacaagcctataatcagatgggaacaaggggaaaacgttggttgggattgtacgtgtacacaatagaaataaagaaaaaaaccatgatcagctgattttagcaccttgtccgcatccccagagtgttgattgggtaatcatgtacagggggccatattggacagtcaacagctcaaaaggctggattagttggtgcgaacgcctgattgcggaggcgccgactgctgaatgtccatgcatcaatggacgacagtgctttgcatgctgttctagttgcttcgccctggtttggttatcattgcatctcaatgcttgagccaataattcctaagctgagacatgtgcaggagtatctcgtcgcggccctggttggtcacgctgctcgtcatgatccaaggaggcgcggcctcgaagtattcgcggattaggccctggaaagtttccacgttttcttcaggtttcctgccgccgttcttcttcttcttgcgcttgtcacattttgtgaa

SEQ ID NO: 14853 - DNA, 551 bp, Zea mays
  unsure (1)..(551): unsure at all n locations; Clone ID: LIB3159-021-Q1-K1-E10.R1
accnncaatccacttcgcaagccccgccgcacacttcttccccctgcctccaaaaactcagaaaaccctgaccgccggggcgcatgcttctccaccaccgcctcctccctcgcctacttcttgttccttccacacatacctccacactcctctgcccctcccgtttgccgcgccgcctctccctctcgccacgcttctacgcgctgccccacctcgcggcaccccagaccgtcgaccactccgacgatgagggggcacccagggggaggggcagatcaagctcccgctcgaccatctcttcgtgccgcccggggcaacaatggatgcgggggacaggaggccgtgagcgcacgggtgcttaagggctccaacatcgtgctgggcccatacgcgcgcgggacgcacaggtggtcaacgcagattttgtaaagagcagcgtgcgtcccgatgactgccctcgggacggccttccggagtttgcactcgttggccggtccaacgtcggcaaatcgtcgctgctcaactcgcttgtccgccgcaagggccttgcc

SEQ ID NO: 14854 - DNA, 556 bp, Zea mays
  Clone ID: LIB3159-021-Q1-K1-E10.R2
acccaatccacttcgcaagccccgccgcacacttcttccccctgcctccaaaaactcagaaaaccctgaccgccggcggcggccatgcttctccaccaccgcctcctccctcgcctacttcttgttccttccacacatacctccacactcctctgcccctcccgtttgccgcgccgcctctccctctcgccacgcttctacgcgctgccccacctcgcggcaccccagaccgtcgaccactccgacgatgagggggcaccccagggggaggggcagatcaagctcccgctcgaccatctcttcgtgccgcccggggcaacaatggatgcgggggaccaggaggccgtgagcgcacgggtgcttaagggctccaacatcgtgctgggcccatacgcgcgcggcgacgcacaggtggtcaacgcagattttgtaaagagcagcgtgcgtcccgatgactgccctcgggacggccttccggagtttgcactcgttggccggtccaacgtcggcaaatcgtcgctgctcaactcgcttgtccgccgcaagcgccttgccc

SEQ ID NO: 14855 - DNA, 500 bp, Zea mays
  Clone ID: LIB3159-021-Q1-K1-E3.F1
acaactacgtattagcacgcaatcagctatacaccaacttccaagattacaatttagggtagcacacaagtgtaggaccacacattcacctcggggaggagaggcgcacaccacaacgcacctattttctttcctactatactttacacacttctaaagatggacacattacattctactacatattagccgcaatccaatatacacataaacggctccggacatgaacagctgctccacggtcaaatcttagaagcagaacttctttttacgaaatttgatcagctcctgcctatcaatgtacgcgagtagctcatcctgtcgcatcaaagcatcataaagggctttctttgtggaaatcagctcagcttccaatgcatccacacggcggacggctgcattgagcaattcttccttttcaaacggcatctcagacggcttcgtttcaagcacctgcaccttgtcctccaactcacccagccgtctcagcatcgatgaaa

SEQ ID NO: 14856 - DNA, 505 bp, Zea mays
  Clone ID: LIB3159-021-Q1-K1-E3.F2
acaactacgtattagcacgcaatcagctatacaccaacttccaagattacaatttagggtagcacacaagtgctagaccacacattcacctcggggaggagaggcgcacaccacaacgcacctattttctttcctactatactttacacacttctaaagatggacacattacattctactacatattagccgcaatccaatatacacataaacggctccggacatgaacagctgctccacggtcaaatcttaaaagcagaacttctttttacgaaatttgatcagctcctgcctatcaatgtacgcgagtagctcatcctgtcgcatcaaagcatcataaagggctttctttgtggaaatcagctcagcttccaatgcatccacacgggggacggctgcattgagcaattcttccttttcaaacggcatctcaaacggcttcgtttcaagcacctgcaccttgtcctccaactcacccagccgtctcagcatcgatgaaatcaca

SEQ ID NO: 14857 - DNA, 538 bp, Zea mays
  Clone ID: LIB3159-021-Q1-K1-E3.R1
gaaataccatgtcaaggaatttgagaggtgcttccagatgagatttcctgcttgctccattgctgcaaaaaagcacatagattcgtcgacttctatttttgatgtgcaaggcgtgggtttcaagaacttctcaaaatctgccagggaattaatcacacgattacagaagatcgacaacgataactacccagagacattgtgccagatgtatataattaatgcgggccaaggcttcgagatgttatggagcacaataaaatcattccttgatccaaaaactgcttccaagattcatgttcttgggaataagtatcaacataagttgctcgaaataattgacgagtgtgaattgccagaatttcttggtggcaaatgcaagtgtattgaaggttgcgaaagatctgacaaaggtccttggaaggatcccaacataataaagagagtcctcaatggcgaggcgaactatggcaggcaaattgtgaccatatccagcactgatggaaggatagtcagttatgcttggccagtgcacccaaat

SEQ ID NO: 14858 - DNA, 540 bp, Zea mays
  Clone ID: LIB3159-021-Q1-K1-E3.R2
gaaataccatgtcaaggaatttgagaggtgcttccagatgagatttcctgcttgctccattgctgcaaaaaagcacatagattcgtcgacttctatttttgatgtgcaaggcgtgggtttcaagaacttctcaaaatctgccagggaattaatcacacgattacagaagatcgacaacgataactacccagagacattgtgccagatgtatataattaatgcgggccaaggcttcaagatgttatggagcacaataaaatcattccttgatccaaaaactgcttccaagattcatgttcttgggaataagtatcaacataagttgctcgaaataattgacgagtgtgaattgccagaatttcttggtggcaaatgcaagtgtattgaaggttgcgaaagatctgacaaaggtccttggaaggatcccaacataataaagagagtcctcaatggcgaggcgaactatggcaggcaaattgtgaccatatccagcactgatggaaggatagtcagttatgcttggccagtgcacccaaatag

SEQ ID NO: 14859 - DNA, 544 bp, Zea mays
  unsure (1)..(544): unsure at all n locations; Clone ID: LIB3159-021-Q1-K1-E6.F1
acaactgaatttaatctctcattctcctccatgtacgatggtgtctttcacataccattacacctttacgattacaacatcacatgaaatcccatgacgcatcatgcttttaagcacggaatgaggggaagtggggaacaaaaaaaaagtaaaagaggatagttcattaacttagccttctaaagcatgtctcgatgtagctacagcagctagctcagcacaccgtaacatgtaacacagagaaaattctccatagagtcaactcctttgatctgcaggtgcaagctttacgnntcatgttatgtatgcccacggcctccacatttggagcacatgatgttcccagttccaccgcaacctaggcatctgactttcacgatgattccctggctctctagtatcgagtcgacgtacaagcctgaaccagcgcacgttgcacacagcaaggcacctttagcttcacagcttgagcagggaggcttgtccccgacattcttcttttccagatttagaccagatggttctccaatgtcctgctcggggt

SEQ ID NO: 14860 - DNA, 547 bp, Zea mays
  Clone ID: LIB3159-021-Q1-K1-E6.F2
acaactgaatttaatctctcattctcctccatgtacgaagtgtgtctttcacataccattacacctttacgattacaacatcacatgaaatcccatgacgcatcatgcttttaagcacggaatgaggggaagtggggaacaaaaaaaaagtaaaagaggatagttcattaacttagccttctaaagcatgtctcgatgtagctacagcagctagctcagcacaccgtaacatgtaacacagagaaaattctccatagagtcaactcctttgatctgcaaggtgcaagctttagcgttcatgttatgtatgcccacggcctccacatttggagcacatgatgttcccagttccaccgcaacctaggcatctgactttcacgatgattccctggctctctagtatcgagtcgacgtacaagcctgaaccagcgcacgttgcacacagcaaggcacctttagcttcacagcttgagcagggaggcttgtccccgacattcttcttttccagatttagaccagatggttctccaatgtcctgctcggggac

SEQ ID NO: 14861 - DNA, 551 bp, Zea mays
  unsure (1)..(551): unsure at all n locations; Clone ID: LIB3159-021-Q1-K1-E6.R1
gctgcgactgcgagcccaagaaaaattttcctctacgagcgcatggaggtgtccgctgggctccggctgccgcccgtcgctgcggcagtcgctccttggctgtcggtccgcgtcggtgccgccgcggcgtnacccattctgtgcggtccgtgtcccgcgcggttaagatcagagcagctgcaattaacggcctccaaagaaacagaagtaatctcgaatcattattctgctacgacaaatctgtccccgagcaggacattggagaaccatctggtctaaatctggaaaagaagaatgtcggggacaagcctccctgctcaagctgtgaagctaaaggtgccttgctgtgtgcaagtgcgctggttcaggcttgtacgtcgactcgatactagagagccagggaatcatcgtgaaagtcagatgcctaggttgcggtggaatgggaacatcatgtgctccaaatgtggaggccgtgggcatacataacatgaacgctaaagcttgcaacttgcagatcaaaggagttgactctatggagaattttctctgtg

SEQ ID NO: 14862 - DNA, 560 bp, Zea mays
  Clone ID: LIB3159-021-Q1-K1-E6.R2
gctgcgactgcgagcccaagaaaaattttcctctacgagcgcatggaggtgtccgctgggctccggctgccgcccgtcgctgcggcagcgtcgctccttggctgtcggtccgcgtcggtgccgccgcgcgcggcggcttcccattctgtgcggtccgtgtcccgcgcggttaagatcagagcagctgcaattaacggcctccaaagaaacagaagtaatctcgaatcattattctgctacgacaaatctgtccccgagcaggacattggagaaccatctggtctaaatctggaaaagaagaatgtcggggacaagcctccctgctcaagctgtgaagctaaaggtgccttgctgtgtgcaacgtgcgctggttcaggcttgtacgtcgactcgatactagagagccagggaatcatcgtgaaagtcagatgcctaggttgcggtggaactgggaacatcatgtgctccaaatgtggaggccgtgggcatacataacatgaacgctaaagcttgcaccttgcagatcaaaggagttgactctatggagaattttctctgtg

SEQ ID NO: 14863 - DNA, 1542 bp, Zea mays
  Clone ID: LIB3159-018-F2_FLI
gttcacagatgaagagattgaacaaagctatgaagaattttatgaagatgtacatacagaatttctgaaatttggtgaacttgtgaatttcaaggtatgtagaaatgggtctttccatcttcgagggaatgtttatgtgcactataaatcgttggattcagctcttcttgcctacagcagcatgaatggacgctattttgctggaaaacagatggaaggcggccatatgcggtgagtacatgaggtcaagatacaagacatgttcacatggagttgcttgtaattttattcactgcttccgcaatcctggaggagattatgagtgggctgattgggacaatcatcctcctagatactggattaggaagatggttgctctttttggtccctcagttgatgagatgaatgaaaaggcgagtcataccccagattttagaagttcagtgggctctgataggaagaaacttaaaatttccagcaacagatatgtttcaagaggatctaggaacgaagatgtgcatacacgacactctcctcaagattattcacattctaagcaagaacgaagtagccacaacatgaattatgagtacagacgacataaaagagattcttcagcagcagataagcaccgaagacaagatgttggagatacaaatgacagacaattttcaacaatgggaaatgacagcaagtcccataggcataagcatgaagaacggcatagaagtgatcatggtaatggagaaaaagaagatgacagcaaaactaggcctaggaagcactgttctgttaggcgtggaagtttggaggttggatattctgactggtctccagacttcactggtacagacaacagcaagggtccttcaggtgagaagtccactagcaggtatgatgatgccaaagggagcaggaggggatcatcagagtattacaatcttgaaagacaccactctacagctcaaaaacaatcaagaaatgagcacagcactacaagacgcaggagacatgacattgaagattatcatgatgaaaaaaatgacggaagaggggaatcccgaaagcataaccgccatgaatcaaacgaccggtgggtagccacaaatagtgatgttgattcggatgtagatagatatcagagttcaagctgtaaaggcactaggttgggaaggaaggatgatgatccaggcattgaagttcggcatcagaggtcaggtagaagtacgaaggatgacaagagaaggaaacatcacagtggaaacaggtggcacagcggcactgaagagggtacctcagattcaagcggtggagatttgagctctgattcgtggagtggtagatcgagaaacagtgagaacttttcagcacacaggtcaaagaggaagcgaagtcggagcaaggagtctggttattagttgtaaatagttagcctctttttggagcacatgaattcgtaggaatcgtgcagaaattttacaggaatcggtttaacttcgcacgaaaaatttcccgcactccaaacatgcggtagtggcttcc

SEQ ID NO: 14864 - DNA, 542 bp, Zea mays
  Clone ID: LIB3159-019-Q1-K1-C2.F2
gataaaaaaaattgaatacacaggctttctttccttaccttatatgccacagctcagttctgtacaatcatacacacgcgcaaacccaaacaggcactactcactcaggtagtagtcatatgggagaaaaatggaagaccagtcgacgaagaaaaaaacaaaaccctggtctcagagcaatatgtcacgcactatgcacatcaccgcaacacacacaaaaaaggcgtgcatattgtcactcctcaatgtcccattttggagccgccgccgctgctctcctgaatgagcggtggcaaatccatgtccgctacgtcgacgtgcactatcagcttcgtgaagtcatccacggagaacggtatgctgaagtcatcgtctagcaggaacgagttgatgtcgacgtgcgccgacgggctgctcgacgagccctcaatcatcttggtccggatgctggagacgacttctgatggaatgcccagggtcccaaacttggggggggagagcatgaggctgatccgggacaggtactgaatgctgaggactgg

SEQ ID NO: 14865 - DNA, 176 bp, Zea mays
  Clone ID: LIB3159-019-Q1-K1-C2.R7
gagacgactttctgatggaatgccagggtccaaacttgtcgtcgcagtacatcgtgctgatccggtacagttgctgcatgctcagcactgggcagaagtcgtctgtgatctccgcgagactccggctatgcttgtcgtcacccacgcgtccgcccacgcgtccgcggacgcgtggg

SEQ ID NO: 14866 - DNA, 208 bp, Zea mays
  Clone ID: LIB3159-019-Q1-K1-D8.F2
agaacaataaactggaaatatcaatgtatttatgaaattgttcattgacaaatgggggtaaaaaaatctataacctgtcttgttacggagatcaacacagttactatcgactgtgacggtcgaccatatgaatggtgacctgatgtgaactaatcaaaagaatactaggtgggacctgcaaggttacgagggtgggtaccaatacttg

SEQ ID NO: 14867 - DNA, 247 bp, Zea mays
  Clone ID: 61LIB3159-001-Q1-K1-G12-R1
gttcagagtttggttttgtgcttgttgcgaaggctacgtggcaaggatgacattgtcaatgctggtatagctggttgttgtactggcctcgctttgggctttccaggggcgccacaggcattgctccaaagctgtgccaccttcgcagcattctcatgcatcatggaggggctcaataagcagcatgctgcaatggctcgcacgcttggagggactgccgcgatggccgtgcatgatgagtgtggtg

SEQ ID NO: 14868 - DNA, 695 bp, Zea mays
  Clone ID: LIB3159-018-F2.R6A
ttcctacgcctagatttgctgtcatcttctttttctccattaccatgatcacttctatgccgttcttcatgcttatgcctatgggacttgctgtcatttcccattgttgaaaattgtctgtcatttgtatctccaacatcttgtcttcggtgcttatctgctgctgaagaatctcttttatgtcgtctgtactcataattcatgttgtggctacttcgttcttgcttagaatgtgaataatcttgaggagagtgtcgtgtatgcacatcttcgttcctagatcctcttgaaacatatctgttgctggaaattttaagtttcttcctatcagagcccactgaacttctaaaatctggggtatgactcgccttttcattcatctcatcaactgagggaccaaaaagagcaaccatcttcctaatccagtatctaggaggatgattgtcccaatcagcccactcataatctcctccaggattgcggaagcagtgaataaaattacaagcaactccatgtgaacatgtcttgtatcttgacctcatgtactcaccgcatatggccgccttacatctgttatccagcaaaatagcgttcattcatgctgctgtaggcaagaagagctgaatccaacgatttatagtgcacataaacattccctcccagatgggaagacccattctacataccttgaaatt

SEQ ID NO: 14869 - DNA, 371 bp, Zea mays
  Clone ID: LIB3159-012-Q1-K1-F4.F2B
attttattattatttatttattattttatttcttatttttattttatttttatttattggtatttttaaataacttgggcagcggattttcaatgggtatacatatagggctgttcccagcattatattggaccttctgcttctgttgaaaaccccctgtccaaactgaggacccatctatgatccatgggcccctgtgtgtgtgtaaaccaccatgtgtgtgtgagacataaatcatgtacatctggaaatagggccgcttgatcatcattatcaggcaagtcgcgtcttcttcagcttgaaccgaattcctcattccagttctccaactcgacccattaactcttttaaaaacttgagctgaacaccgg

SEQ ID NO: 14870 - DNA, 481 bp, Zea mays
  Clone ID: LIB3159-021-Q1-K1-E10.F2B
agctaacaccagaatttattaatcatttaaccccacagtatacacaagcctataatcagatgggaacaaggggaaaacgttggttgggattgtacgtgtacacaatagaaataaagaaaaaaaccatgatcagctgattttagcaccttgtccgcatccccagagtgttgattgggtaatcatgtacagggggccatattggacagtcaacagctcaaaaggctggattagttggtgcgaacgcctgattgcggaggcgccgactgctgaatgtccatgcatcaatggacgacagtgctttgcatgctgttctagttgcttcaccctggtttggttatcattgcatctcaatgcttgagccaataattcctaagctgagacatgtgcaggagtatcttgtcgcggacctggatggtcacgctgttcgtgatgatccaaagaggcgcggccttgaagtatgcgaggattaggccctggaaag

SEQ ID NO: 14871 - DNA, 381 bp, Zea mays
  Clone ID: LIB3159-017-Q1-K1-H1.F1
aacaccagaagaaaacaaaatgtctgcttgaatgtcaacaacaacaacaacagcgtgacctcttaactacacacaagaatgtttctcgtcaagcattcaacatgtacaccaccaaacgcctgccttggaagcgatatcagtatatacagcagcagcagtaggctttacaaactttcgaagacacactacacacttgatagagcgagaggaccaagcaatcactggctgacgtttttcactttctgctcggtctgacttggaaggtttcttaggctccgaagcaaccgatgagcttcttaggagcgtggccggtggcacggtacttggcagccatctcctcggccttcaggacctcctcaccgcgttttgcctccaccatcg

SEQ ID NO: 14872 - DNA, 656 bp, Zea mays
  Clone ID: LIB3159-019-C2_FLI
ccacgcgtccgcccacgcgtccgcggacgcgtgggcggacgcgtgggtgacgacaagcatagccggagtctcgcggagatcacagacgacttctgcccagtgctgagcatgcagcaactgtaccggatcagcacgatgtactgcgacgacaagtttgggaccctgggcattccatcagaagtcgtctccagcatgcggaccaagatgatcgagggctcgtcgagcagcccgtcggcgcacgacgacatcaactcgttcctgctagacgatgacttcagcataccgttctccgtggatgacttcacgaagctgatagtgcacgtcgacgtagcggacatggatttgccaccgctcattcaggagagcagcggcggcggctccaaaatgggacattgaggagtgacaatatgcacgccttttttgtgtgtgttgcggtgatgtgcatagtgcgtgacatattgctctgagaccagggttttgtttttttcttcgtcgactggtcttccatttttctcccatatgactactacctgagtgagtagtgcctgtttgggtttgcgcgtgtgtatgattgtacagaactgagctgtggcatataaggtaaggaaagaaagcctgtgtgattcaattttttttatcaaaaaaaaaaaaaaaag

SEQ ID NO: 14873 - DNA, 521 bp, Zea mays
  Clone ID: LIB3159-007-Q1-K1-E7.F2
agaccactgagacgagccatatatttaggaccactgaacggtgatgaaaaggttaaaatgcaagcgacaacagaaaaaggggcttaccaacacaaccggaccacgctcaaaaggccccagcctgaaacgaggggggatgccggggttttgcccggaacatgtcatatggggagcccccaaattttcccgacaaagaatcataacacggttgctacaagcgtttcacccaagaaaccagggcccagatcacattgcatagtgtcattagacgggggcaaacactagggaccaaaaaaaagggacgtaaagccggttttactggccctcgatcaaggcgagcttgggcgcctccctgatcttttccgcaagggcctcctaaatgtcacaagtccatagggtcaagttatcaccaacgagctgcatgatcaaagggctgcccttggaggacacctccctcaggggggccagttccaaaagggcctcgtaaaaaaactgctttgcaagactgcaagccccatcgg

SEQ ID NO: 14874 - DNA, 519 bp, Zea mays
  Clone ID: LIB3159-007-Q1-K1-E7.R2
cggacgcgtgggcaggcagagaggtacgaggaaatggttgagttcatggagaaggtagcgaaaactgttgactcggaggagctcactgtggaggagcgcaacctcctgtctgttgcatacaagaacgtcattggagcccgccgtgcctcatggcgcatcatctcctccatcgagcagaaggaggagggtcgaggcaatgaggaccgtgtaacactcatcaaggactaccgtggcaagattgaaactgagctcaccaagatctgtgatggcatcctcaagcttctcgaatctcaccttgtgccgtcttccaccgctcccgagtccaaggtcttctatctcaagatgaagggtgactactacagataccttgctgagttcaagactggagctgagagaaaggacgctgctgagacaccatggtggcatacaaggctgcccaagacattgctttggctgagcttgctccaactcaccctattaggcttggactggcactcaacttctcagtgttctactatg

SEQ ID NO: 14875 - DNA, 619 bp, Zea mays
  Clone ID: LIB3159-010-Q1-K1-F5.F2
ggctcataaccatgctgtatatatcacgatagccacagttaacacctgacttgaaaacatagccatacgagttaaggtagcaaataccacatagttgatattcggacgtgacactggaacctggtcgctaaactgaaaaaccaaatgcaaagggcatttgtgatgcaatcttgctactataaacaactttggaccaatcaagcgccgaacccctccacaaccacaaatgcggaaaatctcacacgaaggcagacttgatgtagagaactgaaacttgctagaccagttcccagtccccatcaatgaaggagacgccatcgtctgcgcggtccggcctaaacatgtccacgacaatgtcatccagaccaccactaagtcccctttgcagcctacctgtccccatgagttcgttgttgtagtttagatgactgctgacagcttggtgatcaatcctgccatcttgcagaggggggacaacacaaccacctgaattgctaccacccagtgtctgccctggaacaacagaaccgtctatgcgaaggttcggcaatgtagagttgacgcctgaattctaagcgcaaggttgttattcagcatctctctcgagttcgtgctgctt

SEQ ID NO: 14876 - DNA, 567 bp, Zea mays
  Clone ID: LIB3159-010-Q1-K1-F5.R2
cggacgcgtgggtccacatgccggacatggacggcttcaagctcctcgagcttgtgggcctcgagatggacctcccggtcattatgctgtctgcaaatggggagacacagacagtcatgaaggggattacccatggagcatgtgactacctgctgaagccagtgcgtattgagcagctgaggactatatggcagcatgtggttaggcggaggagttgtgacgccaagaacagtggcaatgacaacgatgattcgggtaaaaagttgcaggtggtgagcgctgaaggtgacaatggcggtgttaatcgcaacaagagaatttcacgcaagggtagggatgataatggtgatgacggtgatgattctgatgacaacagtaatgagaatggagactcgtcgagccagaagaagccaagggttgtgtggtctgttgaattgcaccgaaagtttgtggctgctgtcaaccagcttggcattgacaaggctgttccaaagaaatattggatcttatgaatgttgagaacatccacagggaagaacgttgcaagttatctgcagaagtatcggc

SEQ ID NO: 14877 - DNA, 660 bp, Zea mays
  unsure (1)..(660): unsure at all n locations; Clone ID: LIB3159-016-Q1-K1-C5.F2
aaagtattgtcggcgcctcggcagttttgtatatatatctattacacattacacatgtatggtagccggagcttgcattcacatatatgttcctcacccaacgaatcgacagtcgttgcactacgtacgtaattgtagatggatgatgccatgctggatacatcagcaggagaattgttggaagcaaaaggaaccattgcatgcaggagaaaagaaatgatgagataaagggaaaaaaaaggagggagagagagagaggaaccaatgcaagaaggtgatccgatcaacaggcagaggcatggccatgggtcgatctagccacggtctctactcgctgccggggggcttgtaggcgatgaagctgacgcactgcgtctgcctgacgttgtcgaagccgatgacgcggtggaaggcgtccgggtacgcggcgatggcctcctgcagctccttgtacacctgcgtggcgtcggtgcagccgaacatgggcagcttccacatggtccagtagcggccgtcgtagtagcacggggaggtggagttctcgcggtacacgaacccgagcttgctgaactcgaggcagggtatccagccgttgcgcagcangtagtccacctgcttcagcaggtcgtccgtcgacagcggcggcaggtacgacagcgt

SEQ ID NO: 14878 - DNA, 443 bp, Zea mays
  Clone ID: LIB3159-016-Q1-K1-C5.R2
gcaagcaagctcgatctactactactactagctggtacacatactagccagcctgccagccagcttgccatggcgcccaccgtgatgatggcctcgtcggcaaccgccgtcgccccgttccagggtctcaagtccgccgccagcctccccgtcgcccgccgcagcaccaggagcctcggcaacgtcagcaacggcggaaggatccggtgcatgcaggtgtggccggcctacggcaacaagaagttcgagacgctgtcgtacctgccgccgctgtcgacggacgacctgctgaagcaggtggactacctgctgcgcaacggctggataccctgcctcgagttcagcaagctcgggttcgtgtaccgagagaactccaccttcccgtgctactacgacggccgctactgcaccatgtggaagctgcccatgttcggctgcaccga

SEQ ID NO: 14879 - DNA, 559 bp, Zea mays
  Clone ID: LIB3159-016-Q1-K1-H5.F2
gaaacctaattgcttatattcttaacaaagcacaaaataactagatcttaaagaattctgttacaggactggggctgataaaatgaacacaaaatgacaacgtgtgcaaaaccaggatggatccagcgtacaggggcaccgttcacgttcattatgaccatatacaatcttcaaagatggtctgcgactcaaaggccacttgcggacgacccaccatagggaagcacaaatatctctctctactgggtcttgaacatcatgtggatcatgtccacgacgctgctgctgaacccccactcgatgacgaaccactagacgagcttgatgaagtggtgcatcaaggcaatcccacccttgatgatcaagatgctagaacagatgtgaccacacaagtcgccggtaaccagatcctcatccatgtagctccataatacccttgagtaggccactataagcatgcttaatagctggcttgatttcctcgtaagaggcccccttcttgatcatgacagtgatgggaacaactgatacattcatggagggaacccggaaggacatg

SEQ ID NO: 14880 - DNA, 467 bp, Zea mays
  Clone ID: LIB3159-016-Q1-K1-H5.R2
gctattcgtcggaaacaaccccttaattaccatggcttacatgacgtgcatgtaggcttacgacagcggtcatggtcattgggaccacacagacgtagcgctcagcgacgcgaacacgcttctcttggacaagaagcattttcaggtttatgggcttgagatccccgatgagatcccggagggcgagggtgccgctacgtatgaaaatgctggccacagaggggttcactgacgaggtctaggcatggcgcacatcggaagggagaagccaatatcgttggtatgtgtgtctcaggcaactaacaccctatgttggttggtgctgtccttgcggacaagtacacatagcgtgctatacatggcaaaagaacgctagcatgcacgagaaagtgccttgcaccgctagctaaggtgatacgtgaaagcctgcgctttattgaggtcttgttgacacctgttcatgccat

SEQ ID NO: 14881 - DNA, 381 bp, Zea mays
  Clone ID: LIB3159-017-Q1-K1-H1.F2
aacaccagaagaaaacaaaatgtctgcttgaatgtcaacaacaacaacaacagcgtgacctcttaactacacacaagaatgtttctcgtcaagcattcaacatgtacaccaccaaacgcctgccttggaagcgatatcagtatatacagcagcagcagtaggctttacaaactttcgaagacacactacacacttgatagagcgagaggaccaagcaatcactggctgacgtttttcactttctgctcggtctgacttggaaggtttcttaggctccgaagcaaccgatgagcttcttaggagcgtggccggtggcccggtacttggcagccatctcctcggccttcaggacctcctcaccgcgttttgcctccaccatcg

SEQ ID NO: 14882 - DNA, 381 bp, Zea mays
  Clone ID: LIB3159-017-Q1-K1-H1.R2
cgatggtggaggcaaaacgcggtgaggaggtcctgaaggccgaggagatggctgccaagtaccgggccaccggccacgctcctaagaagctcatcggttgcttcggagcctaagaaaccttccaagtcagaccgagcagaaagtgaaaaacgtcagccagtgattgcttggtcctctcgctctatcaagtgtgtagtgtgtcttcgaaagtttgtaaagcctactgctgctgctgtatatactgatatcgcttccaaggcaggcgtttggtggtgtacatgttgaatgcttgacgagaaacattcttgtgtgtagttaagaggtcacgctgttgttgttgttgttgacattcaagcagacattttgttttcttctggtgtt
